(19) United States
(12) Patent Application Publication
(10) Pub. No.: US 2009/0311183 A1
(43) Pub. Date: Dec. 17, 2009

(54) METALLOPROTEINASE 12 BINDING PROTEINS

(75) Inventors: Laetitia Devy, Somerville, MA (US); Sonia Schoonbroodt, Lixhe (BE); Rene Hoet, TB Zeist (NL); Nicholas Frans, Liege (BE)

Correspondence Address: LANDO & ANASTASI, LLP, ONE MAIN STREET, SUITE 1100, CAMBRIDGE, MA, 02142, US

(73) Assignee: DYAX CORP., Cambridge, MA (US)

(21) Appl. No.: 12/397,258

(22) Filed: Mar. 3, 2009

Related U.S. Application Data
(60) Provisional application No. 61/033,348, filed on Mar. 3, 2008.
(60) Provisional application No. 61/127,830, filed on May 14, 2008.

(51) Int. Cl. A61K 49/00; C07K 16/00; C12N 9/99; A61K 39/395; G01N 33/573; A61P 35/00

(52) U.S. Cl. 424/9.1; 530/387.3; 435/184; 424/134.1; 435/7.4

(57) ABSTRACT

Proteins that bind to matrix metalloproteinase 12 and methods of using such proteins are described.

### CROSS REFERENCE TO RELATED APPLICATIONS

[0001] This application claims priority to U.S. Application Ser. No. 61/033,348, filed on Mar. 3, 2008 and U.S. Application Ser. No. 61/127,830, filed on May 14, 2008. The disclosures of the prior applications are considered part of (and are incorporated by reference in) the disclosure of this application.

### BACKGROUND

[0002] Matrix Metalloproteinases (MMPs) are a family of zinc metalloendopeptidases secreted by cells, and are responsible for much of the turnover of matrix components. The MMP family consists of at least 26 members, all of which share a common catalytic core with a zinc molecule in the active site.

### SUMMARY

[0003] This disclosure relates, inter alia, to proteins that bind MMP-12, herein referred to as “MMP-12 binding proteins,” and methods of identifying and using such proteins. These proteins include antibodies and antibody fragments (e.g., primate antibodies and Fabs, especially human antibodies and Fabs) that bind to MMP-12 (e.g., human MMP-12). In some embodiments, these proteins include antibodies and antibody fragments (e.g., primate antibodies and Fabs, especially human antibodies and Fabs) that inhibit MMP-12 (e.g., human MMP-12) (e.g., inhibit the catalytic activity of MMP-12). The MMP-12 binding proteins can be used in the treatment of diseases, particularly human disease, such as cancer, inflammation, cardiovascular disease, aneurysm, wound healing, aging, and nerve damage in which excess or inappropriate activity of MMP-12 features. In many cases, the proteins have tolerable low or no toxicity.

[0004] In some aspects, the disclosure relates to proteins (e.g., antibodies, peptides and Kunitz domain proteins) that bind MMP-12, in particular, proteins (e.g., antibodies (e.g., human antibodies), peptides and Kunitz domain proteins) that bind and inhibit MMP-12.

[0005] In one embodiment, the disclosure provides a human antibody that binds to human MMP-12. In one embodiment, the human antibody is an inhibitor of the catalytic activity of MMP-12. The antibody can be, e.g., an IgG1, IgG2, IgG3, IgG4, Fab, Fab2′, scFv, minibody, scFv::Fc fusion, Fab::HSA fusion, HSA::Fab fusion, Fab::HSA::Fab fusion, or other molecule that comprises the antigen combining site of one of the antibodies herein listed. In one embodiment, the antibody is used to guide a nano-particle or toxin to a cell expressing MMP-12 on the cell surface. In one embodiment, the antibody causes effector functions (CDC or ADCC) to kill the cell which expresses MMP-12.

[0006] In some embodiments, the VH and VL regions of the binding proteins (e.g., Fabs) can be provided as IgG, Fab, Fab2, Fab2′, scFv, PEGylated Fab, PEGylated scFv, PEGylated Fab2, VH::CH1::HSA+LC, HSA::VH::CH1+LC, LC::HSA+VH::CH1, HSA::LC+VH::CH1, or other appropriate construct.

[0007] In another embodiment, the binding protein comprises a Kunitz domain protein or modified version (e.g., HSA fusion) or peptide-based MMP-12 binding protein that can inhibit MMP-12 activity.

[0008] In one aspect, the disclosure features a protein (e.g., an isolated protein) that binds to MMP-12 (e.g., human MMP-12) and includes at least one immunoglobulin variable region. For example, the protein includes a heavy chain (HC) immunoglobulin variable domain sequence and a light chain (LC) immunoglobulin variable domain sequence. In one embodiment, the protein binds to and inhibits MMP-12 (e.g., inhibits MMP-12 catalytic activity), e.g., human MMP-12.

[0009] In some embodiments, the protein binds to human MMP-12 specifically, and not to MMP-12 from another species (e.g., the protein does not bind to MMP-12 from another species with greater than background levels of binding).

[0010] In some embodiments, the protein binds MMP-12 specifically, and not to another matrix metalloproteinase (e.g., the protein does not bind to any other matrix metalloproteinase with greater than background levels of binding).

[0011] Such binding proteins can be conjugated to a drug (e.g., to form a MMP-12 binding protein-drug conjugate) and used therapeutically. This disclosure relates, in part, to MMP-12 binding protein-drug conjugates, the preparation of these conjugates, and uses thereof. The conjugates can be used, e.g., in the treatment of disorders, e.g., for the treatment of cancer, inflammation, cardiovascular disease, aneurysm, wound healing, aging, or nerve damage. Targeting (e.g., a killing) of the MMP-12 expressing cells and/or tumors, e.g., with high affinity binding protein-drug conjugates can be a potent therapy in the treatment of diseases, e.g., cancer, inflammation, cardiovascular disease, aneurysm, wound healing, aging, and nerve damage.

[0012] The protein can include one or more of the following characteristics: (a) a human CDR or human framework region; (b) the HC immunoglobulin variable domain sequence comprises one or more (e.g., 1, 2, or 3) CDRs that are at least 85, 88, 90, 91, 92, 93, 94, 95, 96, 97, 98, 99, or 100% identical to a CDR of a HC variable domain described herein; (c) the LC immunoglobulin variable domain sequence comprises one or more (e.g., 1, 2, or 3) CDRs that are at least 85, 88, 90, 91, 92, 93, 94, 95, 96, 97, 98, 99, or 100% identical to a CDR of a LC variable domain described herein; (d) the LC immunoglobulin variable domain sequence is at least 85, 88, 90, 91, 92, 93, 94, 95, 96, 97, 98, 99, or 100% identical to a LC variable domain described herein; (e) the HC immunoglobulin variable domain sequence is at least 85, 88, 90, 91, 92, 93, 94, 95, 96, 97, 98, 99, or 100% identical to a HC variable domain described herein; (f) the protein binds an epitope bound by a protein described herein, or an epitope that overlaps with such epitope; and (g) a primate CDR or primate framework region.

[0013] The protein can bind to MMP-12, e.g., human MMP-12, with a binding affinity of at least 10⁵, 10⁶, 10⁷, 10⁸, 10⁹, 10¹⁰ and 10¹¹ M⁻¹. In one embodiment, the protein binds to MMP-12 with a K_{off} slower than 1×10⁻³, 5×10⁻⁴ s⁻¹, or 1×10⁻⁴ s⁻¹. In one embodiment, the protein binds to MMP-12 with a Kₒₙ faster than 1×10², 1×10³, or 5×10³ M⁻¹ s⁻¹. In one embodiment, the protein inhibits human MMP-12 activity, e.g., with a Ki of less than 10⁻⁵, 10⁻⁶, 10⁻⁷, 10⁻⁸, 10⁻⁹, and 10⁻¹⁰ M. The protein can have, for example, an IC₅₀ of less than 100 nM, 10 nM or 1 nM. In some embodiments, the protein has an IC₅₀ of about 1.8 nM. The affinity of the protein for MMP-12 can be characterized by a K_{D} of less than 100 nm, less than 10 nM, or about 3 nM (e.g., 3.1 nM), about 5 nM (e.g., 5 nM), about 6 nm (e.g., 5.9 nM), about 7 nM (e.g., 7.1 nM), or about 10 nM (e.g., 9.6 nM).

[0014] In some embodiments, the protein has a K_{D}<200 nM.

[0015] In some embodiments, the protein has a t½ of at least about 10 minutes (e.g., 11 minutes), at least about 20 minutes (e.g., 18 minutes), at least about 25 minutes (e.g., 25 minutes), at least about 35 minutes (e.g., 33 minutes), or at least about 60 minutes (e.g., 57 minutes).

[0016] In one embodiment, the protein binds the catalytic domain of human MMP-12, e.g., the protein contacts residues in or near the active site of MMP-12.

[0017] In some embodiments, the protein does not contact residues in or near the active site of MMP-12 but instead binds elsewhere on MMP-12 and causes a steric change in MMP-12 that affects (e.g., inhibits) its activity.

[0018] In a preferred embodiment, the protein is a human antibody having the light and heavy chains of antibodies picked from the list comprising M0134-A02, M134-A05, M134-A07, M134-A09, M134-A10, M134-A11, M0134-B01, M134-B04, M0134-B08, M0134-B11, M0134-C01, M0134-C02, M0134-C06, M0134-C09, M0134-C10, M0134-C11, M0134-C12, M0134-D02, M0134-DO3, M0134-E04, M0134-E07, M0134-E08, M134-E11, M0134-F01, M0134-F05, M0134-G02, M0134-G04, M0134-G07, M0135-A03, M0135-A05, M0135-A06, M0135-A07, M0135-B02, M0135-B08, M0135-C01, M0135-C11, M0135-E03, M0135-F03, M0135-F11, M0135-G02, M0135-G03, M0135-G07, M0135-G11, M0135-H03, M0135-H10, M0105-C05, M0105-E11, M0105-F08, M0107-A12, M0108-A02, M0109-G11, M0110-G05, M0129-B11, M0130-A01, M0130-C12, M0130-F06, M0130-H04, M0131-A06, M0131-D03, M0132-A04, M0133-B08, M0133-E05, M0121-E07, M0118-F11, M0125-G07, M0124-E07, M0119-D01, M0119-A02, M0122-C06, M0123-G07, M0063-A02, M0063-A04, M0063-B01, M0063-B11, M0063-C07, M0063-G01, M0065-E12, M0065-G03, M0065-H05, M0067-A02, M0067-B06, M0067-B09, M0067-C10, M0067-F02, M0067-F06, M0069-A04, M0069-A11, M0069-C02, M0069-D10, M0069-G07, M0071-A01, M0071-B07, M0071-D05, M0071-D09, M0071-H03, M0071-H06, M0087-F09, M0088-F07, M0088-G10, M0088-H10, M0089-C01, M0089-F05, M0089-B07, M0089-H11, M0034-C04, M0039-F01, M0041-B05, M0041-G01, M0042-B06, M0006-B10, M0007-H06, M0008-H09, M0009-H08, M001-H11, M0015-F02, M0016-D01, M0013-D11, M0013-G12, M0013-H06, M0014-C09, M0014-G11, M0016-A11, M0016-H05, M0019-C05, M0020-B01, M0022-C07, M0025-D04 and M0027-E11. In a preferred embodiment, the protein is a human antibody having its heavy chain picked from the list comprising M0134-A02, M134-A05, M134-A07, M134-A09, M134-A10, M134-A11, M0134-B01, M134-B04, M0134-B08, M0134-B11, M0134-C01, M0134-C02, M0134-C06, M0134-C09, M0134-C10, M0134-C11, M0134-C12, M0134-D02, M0134-DO3, M0134-E04, M0134-E07, M0134-E08, M134-E11, M0134-F01, M0134-F05, M0134-G02, M0134-G04, M0134-G07, M0135-A03, M0135-A05, M0135-A06, M0135-A07, M0135-B02, M0135-B08, M0135-C01, M0135-C11, M0135-E03, M0135-F03, M0135-F11, M0135-G02, M0135-G03, M0135-G07, M0135-G11, M0135-H03, M0135-H10, M0105-C05, M0105-E11, M0105-F08, M0107-A12, M0108-A02, M0109-G11, M0110-G05, M0129-B11, M0130-A01, M0130-C12, M0130-F06, M0130-H04, M0131-A06, M0131-D03, M0132-A04, M0133-B08, M0133-E05, M0121-E07, M0118-F11, M0125-G07, M0124-E07, M0119-D01, M0119-A02, M0122-C06, M0123-G07, M0063-A02, M0063-A04, M0063-B01, M0063-B11, M0063-C07, M0063-G01, M0065-E12, M0065-G03, M0065-H05, M0067-A02, M0067-B06, M0067-B09, M0067-C10, M0067-F02, M0067-F06, M0069-A04, M0069-A11, M0069-C02, M0069-D10, M0069-G07, M0071-A01, M0071-B07, M0071-D05, M0071-D09, M0071-H03, M0071-H06, M0087-F09, M0088-F07, M0088-G10, M0088-H10, M0089-C01, M0089-F05, M0089-B07, M0089-H11, M0034-C04, M0039-F01, M0041-B05, M0041-G01, M0042-B06, M0006-B10, M0007-H06, M0008-H09, M0009-H08, M001-H11, M0015-F02, M0016-D01, M0013-D11, M0013-G12, M0013-H06, M0014-C09, M0014-G11, M0016-A11, M0016-H05, M0019-C05, M0020-B01, M0022-C07, M0025-D04 and M0027-E11. In a preferred embodiment, the protein is a human antibody having its light chain picked from the list comprising M0134-A02, M134-A05, M134-A07, M134-A09, M134-A10, M134-A11, M0134-B0, M134-B04, M0134-B08, M0134-B11, M0134-C01, M0134-C02, M0134-C06, M0134-C09, M0134-C10, M0134-C11, M0134-C12, M0134-D02, M0134-DO3, M0134-E04, M0134-E07, M0134-E08, M0134-E11, M0134-F01, M0134-F05, M0134-G02, M0134-G04, M0134-G07, M0135-A03, M0135-A05, M0135-A06, M0135-A07, M0135-B02, M0135-B08, M0135-C0, M0135-C11, M0135-E03, M0135-F03, M0135-F11, M0135-G02, M0135-G03, M0135-G07, M0135-G11, M0135-H03, M0135-H10, M0105-C05, M0105-E11, M0105-F08, M0107-A12, M0108-A02, M0109-G11, M0110-G05, M0129-B11, M0130-A01, M0130-C12, M0130-F06, M0130-H04, M0131-A06, M0131-D03, M0132-A04, M0133-B08, M0133-E05, M0121-E07, M0118-F11, M0125-G07, M0124-E07, M0119-D0, M0119-A02, M0122-C06, M0123-G07, M0063-A02, M0063-A04, M0063-B01, M0063-B11, M0063-C07, M0063-G01, M0065-E12, M0065-G03, M0065-H05, M0067-A02, M0067-B06, M0067-B09, M0067-C10, M0067-F02, M0067-F06, M0069-A04, M0069-A11, M0069-C02, M0069-D10, M0069-G07, M0071-A01, M0071-B07, M0071-D05, M0071-D09, M0071-H03, M0071-H06, M0087-F09, M0088-F07, M0088-G10, M0088-H10, M0089-C01, M0089-F05, M0089-B07, M0089-H11, M0034-C04, M0039-F01, M0041-B05, M0041-G01, M0042-B06, M0006-B10, M0007-H06, M0008-H09, M0009-H08, M0011-H11, M0015-F02, M0016-D0, M0013-D11, M0013-G12, M0013-H06, M0014-C09, M0014-G11, M0016-A11, M0016-H05, M0019-C05, M0020-B01, M0022-C07, M0025-D04 and M0027-E11. In a preferred embodiment, the protein is a human antibody having one or more (e.g., 1, 2, or 3) heavy chain CDRs picked from the corresponding CDRs of the list of heavy chains comprising M0134-A02, M134-A05, M134-A07, M134-A09, M134-A10, M134-A11, M0134-B01, M134-B04, M0134-B08, M0134-B11, M0134-C01, M0134-C02, M0134-C06, M0134-C09, M0134-C10, M0134-C11, M0134-C12, M0134-D02, M0134-D03, M0134-E04, M0134-E07, M0134-E08, M134-E11, M0134-F11, M0134-F05, M0134-G02, M0134-G04, M0134-G07, M0135-A03, M0135-A05, M0135-A06, M0135-A07, M0135-B02, M0135-B08, M0135-C01, M0135-C11, M0135-E03, M0135-F03, M0135-F11, M0135-G02, M0135-G03, M0135-G07, M0135-G11, M0135-H03, M0135-H10, M0105-C05, M0105-E11, M0105-F08, M0107-A12, M0108-A02, M0109-G11, M0110-G05, M0129-B11, M0130-A01, M0130-C12, M0130-F06, M0130-H04, M0131-A06, M0131-D03, M0132-A04, M0133-B08, M0133-E05, M0121-E07, M0118-F11, M0125-G07, M0124-E07, M0119-D01, M0119-A02, M0122-C06, M0123-G07, M0063-A02, M0063-A04, M0063-B01, M0063-B11, M0063-C07, M0063-G01, M0065-E12, M0065-G03, M0065-H05, M0067-A02, M0067-B06, M0067-B09, M0067-C10, M0067-F02, M0067-F06, M0069-A04, M0069-A11, M0069-C02, M0069-D10, M0069-G07, M0071-A01, M0071-B07, M0071-D05, M0071-D09, M0071-H03, M0071-H06, M0087-F09, M0088-F07, M0088-G10, M0088-H10, M0089-C01, M0089-F05, M0089-B07, M0089-H11, M0034-C04, M0039-F01, M0041-B05, M0041-G01, M0042-B06, M0006-B10, M0007-H06, M0008-H09, M0009-H08, M0011-H11, M0015-F02, M0016-D01, M0013-D11, M0013-G12, M0013-H06, M0014-C09, M0014-G11, M0016-A11, M0016-H05, M0019-C05, M0020-B01, M0022-C07, M0025-D04 and M0027-E11. In a preferred embodiment, the protein is a human antibody having one or more (e.g., 1, 2, or 3) light chain CDRs picked from the corresponding CDRs of the list of light chains comprising M0134-A02, M134-A05, M134-A07, M134-A09, M134-A10, M134-A11, M0134-B01, M134-B04, M0134-B08, M0134-B11, M0134-C01, M0134-C02, M0134-C06, M0134-C09, M0134-C10, M0134-C11, M0134-C12, M0134-D02, M0134-DO3, M0134-E04, M0134-E07, M0134-E08, M134-E11, M0134-F01, M0134-F05, M0134-G02, M0134-G04, M0134-G07, M0135-A03, M0135-A05, M0135-A06, M0135-A07, M0135-B02, M0135-B08, M0135-C01, M0135-C11, M0135-E03, M0135-F03, M0135-F11, M0135-G02, M0135-G03, M0135-G07, M0135-G11, M0135-H03, M0135-H10, M0105-C05, M0105-E11, M0105-F08, M0107-A12, M0108-A02, M0109-G11, M0110-G05, M0129-B11, M0130-A01, M0130-C12, M0130-F06, M0130-H04, M0131-A06, M0131-D03, M0132-A04, M0133-B08, M0133-E05, M0121-E07, M0118-F11, M0125-G07, M0124-E07, M0119-D01, M0119-A02, M0122-C06, M0123-G07, M0063-A02, M0063-A04, M0063-B01, M0063-B11, M0063-C07, M0063-G01, M0065-E12, M0065-G03, M0065-H05, M0067-A02, M0067-B06, M0067-B09, M0067-C10, M0067-F02, M0067-F06, M0069-A04, M0069-A11, M0069-C02, M0069-D10, M0069-G07, M0071-A01, M0071-B07, M0071-D05, M0071-D09, M0071-H03, M0071-H06, M0087-F09, M0088-F07, M0088-G10, M0088-H10, M0089-C01, M0089-F05, M0089-B07, M0089-H11, M0034-C04, M0039-F01, M0041-B05, M0041-G01, M0042-B06, M0006-B10, M0007-H06, M0008-H09, M0009-H08, M0011-H11, M0015-F02, M0016-D01, M0013-D11, M0013-G12, M0013-H06, M0014-C09, M0014-G11, M0016-A11, M0016-H05, M0019-C05, M0020-B01, M0022-C07, M0025-D04 and M0027-E11.

[0019] In a more preferred embodiment, the protein is a human antibody having the light and heavy chains of antibodies from M0008-H09, M0131-A06 or M0121-E07. In another preferred embodiment, the protein is a human antibody having its heavy chain from M0008-H09, M0131-A06 or M0121-E07. In yet another preferred embodiment, the protein is a human antibody having its light chain from M0008-H09, M0131-A06 or M0121-E07. In an even more preferred embodiment, the protein is a human antibody having one or more (e.g., 1, 2, or 3) heavy chain CDRs from the corresponding CDRs of the heavy chain comprising M0008-H09, M0131-A06 or M0121-E07. In another even more preferred embodiment, the protein is a human antibody having one or more (e.g., 1, 2, or 3) light chain CDRs from the corresponding CDRs of the light chains comprising M0008-H09, M0131-A06 or M0121-E07.

[0020] In a more preferred embodiment, the protein is a human antibody having the light and heavy chains of antibody DX-2712 (also referred to as M0131-A06-GA-S). In another preferred embodiment, the protein is a human antibody having its heavy chain from antibody DX-2712. In yet another preferred embodiment, the protein is a human antibody having its light chain from antibody DX-2712. In an even more preferred embodiment, the protein is a human antibody having one or more (e.g., 1, 2, or 3) heavy chain CDRs from the corresponding CDRs of the heavy chain from antibody DX-2712. In another even more preferred embodiment, the protein is a human antibody having one or more (e.g., 1, 2, or 3) light chain CDRs from the corresponding CDRs of the light chains from antibody DX-2712.

[0021] In another embodiment, the protein is a human antibody having the light and heavy chains of a mutant or variant of DX-2712, e.g., a mutant or variant described herein. In another preferred embodiment, the protein is a human antibody having its heavy chain from a mutant or variant of DX-2712, e.g., a mutant or variant described herein. In yet another preferred embodiment, the protein is a human antibody having its light chain from a variant of DX-2712, e.g., a mutant or variant described herein. In an even more preferred embodiment, the protein is a human antibody having one or more (e.g., 1, 2, or 3) heavy chain CDRs from the corresponding CDRs of the heavy chain from a mutant or variant of DX-2712, e.g., a mutant or variant described herein. In another even more preferred embodiment, the protein is a human antibody having one or more (e.g., 1, 2, or 3) light chain CDRs from the corresponding CDRs of the light chains from a mutant or variant of DX-2712, e.g., a mutant or variant described herein.

[0022] In a more preferred embodiment, the protein is a human antibody having the light and heavy chains of antibody 539B-X0041-D02. In another preferred embodiment, the protein is a human antibody having its heavy chain from antibody 539B-X0041-D02. In yet another preferred embodiment, the protein is a human antibody having its light chain from antibody 539B-X0041-D02. In an even more preferred embodiment, the protein is a human antibody having one or more (e.g., 1, 2, or 3) heavy chain CDRs from the corresponding CDRs of the heavy chain from antibody 539B-X0041-D02. In another even more preferred embodiment, the protein is a human antibody having one or more (e.g., 1, 2, or 3) light chain CDRs from the corresponding CDRs of the light chains from antibody 539B-X0041-D02.

[0023] In another embodiment, the protein is a human antibody having the light and heavy chains of a variant of 539B-X0041-D02, e.g., a variant described herein. In another preferred embodiment, the protein is a human antibody having its heavy chain from a variant of 539B-X0041-D02, e.g., a variant described herein. In yet another preferred embodiment, the protein is a human antibody having its light chain from a variant of 539B-X0041-D02, e.g., a variant described herein. In an even more preferred embodiment, the protein is a human antibody having one or more (e.g., 1, 2, or 3) heavy chain CDRs from the corresponding CDRs of the heavy chain from a variant of 539B-X0041-D02, e.g., a variant described herein. In another even more preferred embodiment, the protein is a human antibody having one or more (e.g., 1, 2, or 3) light chain CDRs from the corresponding CDRs of the light chains from a variant of 539B-X0041-D02, e.g., a variant described herein.

[0024] In one embodiment, the HC and LC variable domain sequences are components of the same polypeptide chain. In another, the HC and LC variable domain sequences are components of different polypeptide chains. For example, the protein is an IgG, e.g., IgG1, IgG2, IgG3, or IgG4. The protein can be a soluble Fab (sFab). In other implementations the protein includes a Fab2′, scFv, minibody, scFv::Fc fusion, Fab::HSA fusion, HSA::Fab fusion, Fab::HSA::Fab fusion, or other molecule that comprises the antigen combining site of one of the binding proteins herein. The VH and VL regions of these Fabs can be provided as IgG, Fab, Fab2, Fab2′, scFv, PEGylated Fab, PEGylated scFv, PEGylated Fab2, VH::CH1::HSA+LC, HSA::VH::CH1+LC, LC::HSA+VH::CH1, HSA::LC+VH::CH1, or other appropriate construction.

[0025] In one embodiment, the protein is a human or humanized antibody or is non-immunogenic in a human. For example, the protein includes one or more human antibody framework regions, e.g., all human framework regions. In one embodiment, the protein includes a human Fc domain, or an Fc domain that is at least 95, 96, 97, 98, or 99% identical to a human Fc domain.

[0026] In one embodiment, the protein is a primate or primatized antibody or is non-immunogenic in a human. For example, the protein includes one or more primate antibody framework regions, e.g., all primate framework regions. In one embodiment, the protein includes a primate Fc domain, or an Fc domain that is at least 95, 96, 97, 98, or 99% identical to a primate Fc domain. “Primate” includes humans (Homo sapiens), chimpanzees (Pan troglodytes and Pan paniscus (bonobos)), gorillas (Gorilla gorilla), gibons, monkeys, lemurs, aye-ayes (Daubentonia madagascariensis), and tarsiers.

[0027] In certain embodiments, the protein includes no sequences from mice or rabbits (e.g., is not a murine or rabbit antibody).

[0028] In one embodiment, protein is physically associated with a nanoparticle, and can be used to guide a nanoparticle to a cell expressing MMP-12 on the cell surface. In one embodiment, the protein causes effector cells (CDC or ADCC) to kill a cell which expresses MMP-12.

[0029] In another aspect, the disclosure features a MMP-12 binding protein that is a competitive inhibitor of MMP-12. In some embodiments, the binding protein competes with an MMP-12 substrate (e.g., lung extracellular matrix, elastin, gelatin, fibronectin, apo[α], apoB-100, collagen, osteonectin, TFPI, alpha 1-protease inhibitor, uPAR and CD 14), e.g., binds to the same epitope as the substrate, e.g., and prevents substrate binding.

[0030] In some aspects, the disclosure features a method of inhibiting an interaction between MMP-12 and an MMP-12 substrate (e.g., lung extracellular matrix, elastin, gelatin, fibronectin, apo[α], apoB-100, collagen, osteonectin, TFPI, alpha 1-protease inhibitor, uPAR and CD14). The method includes contacting an MMP-12 binding protein described herein with MMP-12 (e.g., in vitro or in vivo), wherein the binding protein binds to MMP-12 and thereby prevents the binding of an MMP-12 substrate to MMP-12. In some embodiments, the binding protein binds to the same epitope on MMP-12 as the substrate, e.g., the binding protein is a competitive inhibitor. In some embodiments, the binding protein does not bind the same epitope as the substrate but causes a steric change in MMP-12 that decreases or inhibits the ability of the substrate to bind.

[0031] In one aspect, the disclosure features a MMP-12 binding protein-drug conjugate that includes a MMP-12 binding protein and a drug.

[0032] In one embodiment, the binding protein comprises at least one immunoglobulin variable region, and/or the protein binds to and/or inhibits MMP-12, e.g., inhibits MMP-12 catalytic activity.

[0033] In one embodiment, the drug is a cytotoxic or cytostatic agent. The cytotoxic agent can be, e.g., selected from the group consisting of an auristatin, a DNA minor groove binding agent, a DNA minor groove alkylating agent, an enediyne, a lexitropsin, a duocarmycin, a taxane, a puromycin, a dolastatin, a podophyllotoxin, a baccatin derivative, a cryptophysin, a combretastatin, a maytansinoid, and a vinca alkaloid. In one embodiment, the cytotoxic agent is an auristatin and, e.g., the auristatin is selected from AFP, MMAF, MMAE, AEB, AEVB and auristatin E. In one embodiment, the auristatin is AFP or MMAF. In another embodiment, the cytotoxic agent is a maytansinoid and, e.g., the maytansinoid is selected from a maytansinol, maytansine, DM1, DM2, DM3 and DM4. In one embodiment, the maytansinoid is DM1. In another embodiment, the cytotoxic agent is selected from paclitaxel, docetaxel, CC-1065, SN-38, topotecan, morpholino-doxorubicin, rhizoxin, cyanomorpholino-doxorubicin, dolastatin-10, echinomycin, combretatstatin, calicheamicin, and netropsin. In one embodiment, the cytotoxin is an auristatin, a maytansinoid, or calicheamicin.

[0034] In one embodiment, the cytotoxic agent is an antitubulin agent and, e.g., the antitubulin agent is selected from AFP, MMAP, MMAE, AEB, AEVB, auristatin E, vincristine, vinblastine, vindesine, vinorelbine, VP-16, camptothecin, paclitaxel, docetaxel, epothilone A, epothilone B, nocodazole, colchicines, colcimid, estramustine, cemadotin, discodermolide, maytansinol, maytansine, DM1, DM2, DM3, DM4 and eleutherobin.

[0035] In one embodiment, the MMP-12 binding protein (e.g., antibody) is conjugated to the drug (e.g., cytotoxic agent) via a linker. In one embodiment, the linker is cleavable under intracellular conditions, e.g., the cleavable linker is a peptide linker cleavable by an intracellular protease. In one embodiment, the linker is a peptide linker, e.g., a dipeptide linker, e.g., a val-cit linker or a phe-lys linker. In one embodiment, the cleavable linker is hydrolyzable at a pH of less than 5.5, e.g., the hydrolyzable linker is a hydrazone linker. In another embodiment, the cleavable linker is a disulfide linker.

[0036] A binding protein described herein can be provided as a pharmaceutical composition, e.g., including a pharmaceutically acceptable carrier. The composition can be at least 10, 20, 30, 50, 75, 85, 90, 95, 98, 99, or 99.9% free of other protein species. In some embodiments, the binding protein can be produced under GMP (good manufacturing practices). In some embodiments, the binding protein is provided in pharmaceutically acceptable carriers, e.g., suitable buffers or excipients.

[0037] The dose of a binding protein (e.g., a pharmaceutical composition containing a binding protein described herein) is sufficient to block about 20%, about 30%, about 40%, about 50%, about 60%, about 70%, about 80%, about 85%, about 90%, about 95%, about 99%, or about 100% of the activity of MMP-12 in the patient, e.g., at the site of disease. Depending on the disease, this may require a dose, e.g., of between about 0.01 mg/Kg to about 100 mg/Kg, e.g., between about 0.1 and about 10 mg/Kg. For example, the dose can be a dose of about 0.1, about 1, about 3, about 6, or about 10 mg/Kg. For example, for an IgG having a molecular mass of 150,000 g/mole (2 binding sites), these doses correspond to approximately 18 nM, 180 nM, 540 nM, 1.08 microM, and 1.8 microM, respectively, of binding sites for a 5 L blood volume. Medicine being partly an art, the optimal dose will be established by clinical trials, but will most likely lie in this range.

[0038] In another aspect, the disclosure features a method of detecting an MMP-12 in a sample, e.g., a sample from a patient (e.g., tissue biopsy or blood sample). The method includes: contacting the sample with an MMP-12 binding protein; and detecting an interaction between the protein and the MMP-12, if present. In some embodiments, the protein includes a detectable label. An MMP-12 binding protein can be used to detect MMP-12 in a subject. The method includes: administering an MMP-12 binding protein to a subject; and detecting the protein in the subject. In some embodiments, the protein further includes a detectable label. For example, the detecting comprises imaging the subject. For example, MMP-12 activity can be a marker of inflammation and/or disease progression in subjects with, or suspected of having, an inflammatory disorder of the lung such as, e.g., emphysema and chronic obstructive pulmonary disease (COPD).

[0039] In another aspect, the disclosure features a method of modulating MMP-12 activity. The method includes: contacting an MMP-12 with an MMP-12 binding protein (e.g., in a human subject), thereby modulating MMP-12 activity. In some embodiments, the binding protein inhibits MMP-12 activity (e.g., inhibits MMP-12 catalytic activity).

[0040] In another aspect, the disclosure features a method of treating cancer (e.g., metastatic cancer) (e.g., in a subject that has cancer or is suspected of having cancer). The method includes: administering, to a subject, an MMP-12 binding protein in an amount sufficient to treat a cancer in the subject. For example, the cancer is head and neck cancer, oral cavity cancer, laryngeal cancer, chondrosarcoma, breast cancer (which may be estrogen receptor positive (ER+), estrogen receptor negative (ER−), Her2 positive (Her2+), Her2 negative (Her2−), or a combination thereof, e.g., ER+/Her2+, ER+/Her2−, ER−/Her2+, or ER−/Her2−), laryngeal cancer, ovarian cancer, lung cancer (e.g., non-small cell lung cancer), prostate cancer, colon cancer, colorectal cancer, heptacellular cancer, testicular carcinoma, melanoma, or a brain tumor (e.g., astrocytomas, glioblastomas, gliomas).

[0041] MMP-12 binding proteins can be useful for modulating metastatic activity in a subject (e.g., in a subject that has a metastatic cancer or is suspected of having a metastatic cancer). The protein can be administered, to the subject, in an amount effective to modulate metastatic activity. For example, the protein inhibits one or more of: tumor growth, tumor embolism, tumor mobility, tumor invasiveness, and cancer cell proliferation.

[0042] The methods disclosed herein relating to the treatment cancer (e.g., treating cancer and/or modulation of metastatic activity) can further include providing (e.g., administering) to the subject a second therapy that is an anti-cancer therapy, e.g., administration of a chemotherapeutic, e.g., an agent that antagonizes signaling through a VEGF pathway, e.g., bevacizumab (AVASTIN®). In one embodiment, the second therapy includes administering 5-FU, leucovorin, and/or irinotecan. In one embodiment, the second therapy includes administering a Tie1 inhibitor (e.g., an anti-Tie1 antibody). In one embodiment, the second therapy is an inhibitor of plasmin (e.g., a kunitz domain disclosed in U.S. Pat. No. 6,010,880, such as a protein or polypeptide comprising the amino acid sequence

| | |
|---|---|
| MHSFCAFKAETGPCRARFDRWFFNIFTRQCEEFI | (SEQ ID NO: 1) |
| YGGCEGNQNRFESLEECKKMCTRD. | |

[0043] In another aspect, the disclosure features a method of treating inflammation (e.g., in a subject that has inflammation or is suspected of having inflammation, e.g., inflammation associated with an inflammatory disease) or an inflammatory disease (e.g., in a subject that has an inflammatory disease or is suspected of having an inflammatory disease). Inflammatory diseases that can be treated include, e.g., atherosclerosis, multiple sclerosis, systemic sclerosis, nephritis, encephalomyelitis (e.g., experimental autoimmune encephalomyelitis), rheumatoid arthritis, encephalitis (e.g., viral encephalitis), colitis (e.g., enterocolitis) and neuroinflammatory disease. The method includes: administering, to a subject, an MMP-12 binding protein in an amount sufficient to treat inflammation in the subject. The method can further include providing to the subject a second therapy that is an inflammation therapy. For example, particularly for rheumatoid arthritis, the second therapy comprises administering one or more of the following agents: aspirin, naproxen, ibuprofen, etodolac, cortisone (corticosteroids), antacids, sucralfate, proton-pump inhibitors, misoprostol, gold (e.g., gold salts, gold thioglucose, gold thiomalate, oral gold), methotrexate, sulfasalazine, D-penicillamine, azathioprine, cyclophosphamide, chlorambucil, cyclosporine, leflunomide, etanercept, infliximab, anakinra, adalimumab, and/or hydroxychloroquine.

[0044] In another aspect, the disclosure features a method of treating a disease associated with inflammation of the lung (e.g., in a subject that has inflammation of the lung or is suspected of having inflammation of the lung) or a disease associated with inflammation of the lung (e.g., in a subject that has a disease associated with inflammation of the lung or is suspected of having a disease associated with inflammation of the lung). Diseases associated with inflammation of the lung include, e.g., emphysema, chronic obstructive pulmonary disease (COPD), asthma, and lung injury in hyperoxia. The method includes: administering, to a subject, an MMP-12 binding protein in an amount sufficient to treat inflammation of the lung in the subject. The method can further include providing to the subject a second therapy that is an inflammation therapy.

[0045] In another aspect, the disclosure features a method of treating cardiovascular disease (e.g., in a subject that has cardiovascular disease or is suspected of having cardiovascular disease). The method includes: administering, to a subject, an MMP-12 binding protein in an amount sufficient to treat cardiovascular disease in the subject. The method can further include providing to the subject a second therapy that is a therapy for cardiovascular disease.

[0046] In another aspect, the disclosure features a method of treating a stroke or aneurysm (e.g., in a subject that has a stroke or aneurysm or is suspected of having a stroke or aneurysm). The method includes: administering, to a subject, an MMP-12 binding protein in an amount sufficient to treat the stroke or aneurysm in the subject. The method can further include providing to the subject a second therapy that is a therapy for stroke or aneurysm.

[0047] In another aspect, the disclosure features a method of treating nerve damage associated with excess or inappropriate activity of MMP-12 (e.g., spinal cord injury). The method includes: administering, to a subject, an MMP-12 binding protein in an amount sufficient to treat the nerve damage in the subject. In one embodiment, the method further includes administering a second therapy that is a therapy for nerve damage.

[0048] Other exemplary therapeutic methods that include administering an MMP-12 binding protein are described below. An MMP-12 binding protein described herein can be administered in combination with one or more other MMP inhibitors, e.g., small molecule inhibitors, e.g., broad specificity inhibitors. In one embodiment, the small molecule inhibitors are one or more of the small molecule inhibitors described herein. In another embodiment, the one or more MMP inhibitors include another MMP-12 binding protein, e.g., another MMP-12 binding protein described herein.

[0049] MMP-12 binding proteins are useful for targeted delivery of an agent to a subject (e.g., a subject who has or is suspected of having a tumor), e.g., to direct the agent to a tumor in the subject. For example, an MMP-12 binding protein that is coupled to an anti-tumor agent (such as a chemotherapeutic, toxin, drug, or a radionuclide (e.g., ¹³¹I, ⁹⁰Y, ¹⁷⁷Lu)) can be administered to a subject who has or is suspected of having a tumor.

[0050] In another aspect, the disclosure features a method of imaging a subject. The method includes administering an MMP-12 binding protein to the subject. In some embodiments, the protein is one that does not substantially inhibit MMP-12 catalytic activity. Exemplary MMP-12 binding proteins are described herein such as, e.g., M0013-A02, M0013-A03, M0013-A1, M0013-B07, M0013-B08, M0013-B10, M0013-D02, M0013-D04, M0013-D06, M0013-D10, M0013-E05, M0013-F07, M0013-G04, M0013-H04, M0014-A09, M0014-B09, M0014-D11, M0015-G04, M0016-A02, M0016-A04, M0016-C13, M0016-C10, M0016-D07, M0016-F03, M0016-H09, M0018-A05, M0018-D01, M0019-A10, M0019-C07, M0019-G07, M0019-G10, M0020-C08, M0020-H02, M0021-B03, M0021-D06, M0021-E12, M0021-G07, M0022-A02, M0023-B11, M0023-D03, M0023-D05, M0023-E09, M0023-H01, M0024-C02, M0025-F02, M0025-G01, M0025-H03, M0025-H11, M0026-A01, M0026-A05, M0026-A09, M0026-A10, M0026-B11, M0026-C03, M0026-C07, M0026-E01, M0026-E11, M0026-F03, M0026-F04, M0026-G12, M0026-H05, M0027-A08, M0027-B03, M0027-B08, M0027-C07, M0027-G02, M0027-H04, M0028-E09, M0028-F04, M0035-C05, M0040-A02, M0041-G04, M0007-A10, M0052-F03, M0041-A05, M0034-C04, M0038-D06, M0007-H06, M0038-A03, M0039-B02, M0035-D06, M0042-H01, M0040-C08, M0038-F09, M0040-E08, M0034-E11, M0008-E08, M0039-F01, M0030-A10, M0052-E10, M0040-A03, M0040-B05, M0041-G01, M0038-H04 and M0032-H09. Preferably, the MMP-12 binding protein is M0030-A10, M0032-H09, M0038-A03, M0038-H04, M0039-B02, M0040-B05, M0041-A05, R011-B11, M0007-A10 (also referred to as M7A10) or M0008-E08 (also referred to as M8E8). The MMP-12 binding protein may include a detectable label (e.g., a radionuclide or an MRI-detectable label). In one embodiment, the subject has or is suspected of having a tumor. The method is useful for cancer diagnosis, intraoperative tumor detection, post-operative tumor detection, or monitoring tumor invasive activity.

[0051] In one aspect, the disclosure features the use of an MMP-12 binding protein described herein for the manufacture of a medicament for the treatment of a disorder described herein, e.g., cancer, inflammation, cardiovascular disease, aneurysm, wound healing, aging, and nerve damage cancer, inflammation, cardiovascular disease, aneurysm, wound healing, aging, and nerve damage.

[0052] The details of one or more embodiments of the invention are set forth in the accompanying drawings and the description below. Other features, objects, and advantages of the invention will be apparent from the description and drawings, and from the claims.

[0053] The contents of all cited references including literature references, issued patents, published or non-published patent applications cited throughout this application as well as those listed below are hereby expressly incorporated by reference in their entireties. In case of conflict, the present application, including any definitions herein, will control.

### DESCRIPTION OF DRAWINGS

[0054] FIG. 1 is a graph depicting inhibition assays of MMP-12 using non-inhibitor binding proteins.

[0055] FIGS. 2A, 2B and 2C: FIG. 2A is a line graph showing human MMP-12 activity (Fluo/min) in the presence of increasing concentrations (nM) of an MMP-12 binding protein (539B-M08H09). FIG. 2B is a line graph showing the binding rate of elastin (dF/min) in the presence of increasing concentrations (nM) of an MMP-12 binding protein (539B-M08H09). FIG. 2C is a line graph showing murine MMP-12 activity (Fluo/sec) in the presence of increasing concentrations (nM) of an MMP-12 binding protein (539B-M08H09).

[0056] FIGS. 3A and 3B: FIG. 3A is a line graph showing measured IC₅₀ (nM) of an MMP-12 binding protein (M08H09) versus substrate concentration (μM) of human MMP-12. FIG. 3B is a line graph showing measured IC₅₀ (nM) of an MMP-12 binding protein (M08H09) versus substrate concentration (μM) of murine MMP-12.

[0057] FIGS. 4A and 4B are line graphs showing murine MMP-12 activity (Fluo/sec) in the presence of increasing concentrations (nM) of an MMP-12 binding protein (539B-M11H11Fab (FIG. 4A) and IgG (FIG. 4B)).

[0058] FIG. 5 is a bar graph showing ELISA competition assays with four different MMP-12 binding proteins, M08H09, M0013-G12, M0016-A11 and R0062-E11.

[0059] FIG. 6 is a bar graph showing the effect of various doses of MMP-12 binding proteins M08-H09 and M11-H11 on peribronchial inflammation score in OVA-challenged mouse model of airway inflammation.

[0060] FIGS. 7A and 7B are bar graphs showing eosinophil percentages (FIG. 7A) and counts (FIG. 7B) in OVA-challenged mouse model of airway inflammation administered various doses of MMP-12 binding proteins M08-H09 and M11-H11.

[0061] FIG. 8 is a bar graph showing the effect of an MMP-12 binding protein (M08-H09) on inflammatory cell infiltration into a carrageenan-stimulated mouse air pouch.

[0062] FIG. 9 is a line graph showing human MMP-12 activity (Fluo/sec) in the presence of increasing concentrations (nM) of an MMP-12 binding protein (539B-M131A06) and an MMP-12 binding protein (539B-M131A06-GA-S) which is a version of 539B-M131A06 that has been modified to remove a glycosylation site.

[0063] FIGS. 10A and 10B summarize the identification of amino acid changes in affinity matured variant HV-CDRs (cycles 1 and 2) that contribute to improvement in affinity and inhibition properties. The rows in FIG. 10B correspond to the rows in FIG. 10A.

### DETAILED DESCRIPTION

[0064] Matrix metalloproteinase-12 (MMP-12) is a type IV collagenase that is members of a group of secreted zinc metalloproteases which, in mammals, degrade various proteins of the extracellular matrix. Other members of this group include interstitial collagenase (MMP-1) and stromelysin (MMP-3). MMP-12 (a.k.a. macrophage elastase, macrophage metalloelastase, or matrix metalloproteinase 12) is thought to be involved in many disease states. Many small molecule inhibitors of MMP-12 have been tested for safety and efficacy in cancer and other diseases. So far, all have lacked either sufficient potency or sufficient specificity or both. The present disclosure provides proteins that bind MMP-12, and in some instances, inhibit MMP-12 activity. In many instances, the disclosed MMP-12 binding proteins bind and inhibit human and mouse MMP12 enzyme activity. In other instances, MMP-12 binding proteins are disclosed that bind MMP-12 but do not inhibit MMP-12 activity. Such MMP-12 binding proteins are useful, e.g., to determine the presence of MMP-12.

[0065] The term “binding protein” refers to a protein that can interact with a target molecule. This term is used interchangeably with “ligand.” An “MMP-12 binding protein” refers to a protein that can interact with MMP-12, and includes, in particular, proteins that preferentially interact with and/or inhibit MMP-12. For example, the MMP-12 binding protein is an antibody.

[0066] The term “antibody” refers to a protein that includes at least one immunoglobulin variable domain or immunoglobulin variable domain sequence. For example, an antibody can include a heavy (H) chain variable region (abbreviated herein as VH), and a light (L) chain variable region (abbreviated herein as VL). In another example, an antibody includes two heavy (H) chain variable regions and two light (L) chain variable regions. The term “antibody” encompasses antigen-binding fragments of antibodies (e.g., single chain antibodies, Fab and sFab fragments, F(ab′)₂, Fd fragments, Fv fragments, scFv, and domain antibodies (dAb) fragments (de Wildt et al., Eur J. Immunol. 1996; 26(3):629-39)) as well as complete antibodies. An antibody can have the structural features of IgA, IgG, IgE, IgD, IgM (as well as subtypes thereof). Antibodies may be from any source, but primate (human and non-human primate) and primatized are preferred

[0067] The VH and VL regions can be further subdivided into regions of hypervariability, termed “complementarity determining regions” (“CDR”), interspersed with regions that are more conserved, termed “framework regions” (“FR”). The extent of the framework region and CDRs has been precisely defined (see, Kabat, E. A., et al. (1991) Sequences of Proteins of Immunological Interest, Fifth Edition, U.S. Department of Health and Human Services, NIH Publication No. 91-3242, and Chothia, C. et al. (1987) J. Mol. Biol. 196:901-917, see also www.hgmp.mrc.ac.uk). Kabat definitions are used herein. Each VH and VL is typically composed of three CDRs and four FRs, arranged from amino-terminus to carboxy-terminus in the following order: FR1, CDR1, FR2, CDR2, FR3, CDR3, FR4.

[0068] As used herein, an “immunoglobulin variable domain sequence” refers to an amino acid sequence which can form the structure of an immunoglobulin variable domain such that one or more CDR regions are positioned in a conformation suitable for an antigen binding site. For example, the sequence may include all or part of the amino acid sequence of a naturally-occurring variable domain. For example, the sequence may omit one, two or more N- or C-terminal amino acids, internal amino acids, may include one or more insertions or additional terminal amino acids, or may include other alterations. In one embodiment, a polypeptide that includes immunoglobulin variable domain sequence can associate with another immunoglobulin variable domain sequence to form an antigen binding site, e.g., a structure that preferentially interacts with an MMP-12 protein, e.g., the MMP-12 catalytic domain.

[0069] The VH or VL chain of the antibody can further include all or part of a heavy or light chain constant region, to thereby form a heavy or light immunoglobulin chain, respectively. In one embodiment, the antibody is a tetramer of two heavy immunoglobulin chains and two light immunoglobulin chains, wherein the heavy and light immunoglobulin chains are inter-connected by, e.g., disulfide bonds. In IgGs, the heavy chain constant region includes three immunoglobulin domains, CH1, CH2 and CH3. The light chain constant region includes a CL domain. The variable region of the heavy and light chains contains a binding domain that interacts with an antigen. The constant regions of the antibodies typically mediate the binding of the antibody to host tissues or factors, including various cells of the immune system (e.g., effector cells) and the first component (Clq) of the classical complement system. The light chains of the immunoglobulin may be of type kappa or lambda. In one embodiment, the antibody is glycosylated. An antibody can be functional for antibody-dependent cytotoxicity and/or complement-mediated cytotoxicity.

[0070] One or more regions of an antibody can be human or effectively human. For example, one or more of the variable regions can be human or effectively human. For example, one or more of the CDRs can be human, e.g., HC CDR1, HC CDR2, HC CDR3, LC CDR1, LC CDR2, and LC CDR3. Each of the light chain CDRs can be human. HC CDR3 can be human. One or more of the framework regions can be human, e.g., FR1, FR2, FR3, and FR4 of the HC or LC. For example, the Fc region can be human. In one embodiment, all the framework regions are human, e.g., derived from a human somatic cell, e.g., a hematopoietic cell that produces immunoglobulins or a non-hematopoietic cell. In one embodiment, the human sequences are germline sequences, e.g., encoded by a germline nucleic acid. In one embodiment, the framework (FR) residues of a selected Fab can be converted to the amino-acid type of the corresponding residue in the most similar primate germline gene, especially the human germline gene. One or more of the constant regions can be human or effectively human. For example, at least 70, 75, 80, 85, 90, 91, 92, 93, 94, 95, 96, 97, 98, 99, or 100% of an immunoglobulin variable domain, the constant region, the constant domains (CH1, CH2, CH3, CL1), or the entire antibody can be human or effectively human.

[0071] All or part of an antibody can be encoded by an immunoglobulin gene or a segment thereof. Exemplary human immunoglobulin genes include the kappa, lambda, alpha (IgA1 and IgA2), gamma (IgG1, IgG2, IgG3, IgG4), delta, epsilon and mu constant region genes, as well as the many immunoglobulin variable region genes. Full-length immunoglobulin “light chains” (about 25 KDa or about 214 amino acids) are encoded by a variable region gene at the NH₂-terminus (about 110 amino acids) and a kappa or lambda constant region gene at the COOH—terminus. Full-length immunoglobulin “heavy chains” (about 50 KDa or about 446 amino acids), are similarly encoded by a variable region gene (about 116 amino acids) and one of the other aforementioned constant region genes, e.g., gamma (encoding about 330 amino acids). The length of human HC varies considerably because HC CDR3 varies from about 3 amino-acid residues to over 35 amino-acid residues.

[0072] The term “antigen-binding fragment” of a full length antibody refers to one or more fragments of a full-length antibody that retain the ability to specifically bind to a target of interest. Examples of binding fragments encompassed within the term “antigen-binding fragment” of a full length antibody include (i) a Fab fragment, a monovalent fragment consisting of the VL, VH, CL and CH1 domains; (ii) a F(ab′)₂ fragment, a bivalent fragment including two Fab fragments linked by a disulfide bridge at the hinge region; (iii) a Fd fragment consisting of the VH and CH1 domains; (iv) a Fv fragment consisting of the VL and VH domains of a single arm of an antibody, (v) a dAb fragment (Ward et al., (1989) Nature 341:544-546), which consists of a VH domain; and (vi) an isolated complementarity determining region (CDR) that retains functionality. Furthermore, although the two domains of the Fv fragment, VL and VH, are coded for by separate genes, they can be joined, using recombinant methods, by a synthetic linker that enables them to be made as a single protein chain in which the VL and VH regions pair to form monovalent molecules known as single chain Fv (scFv). See e.g., U.S. Pat. No. 5,260,203, 4,946,778, and 4,881,175; Bird et al. (1988) Science 242:423-426; and Huston et al. (1988) Proc. Natl. Acad. Sci. USA 85:5879-5883.

[0073] Antibody fragments can be obtained using any appropriate technique including conventional techniques known to those with skill in the art. The term “monospecific antibody” refers to an antibody that displays a single binding specificity and affinity for a particular target, e.g., epitope. This term includes a “monoclonal antibody” or “monoclonal antibody composition,” which as used herein refer to a preparation of antibodies or fragments thereof of single molecular composition, irrespective of how the antibody was generated.

[0074] An “effectively human” immunoglobulin variable region is an immunoglobulin variable region that includes a sufficient number of human framework amino acid positions such that the immunoglobulin variable region does not elicit an immunogenic response in a normal human. An “effectively human” antibody is an antibody that includes a sufficient number of human amino acid positions such that the antibody does not elicit an immunogenic response in a normal human.

[0075] A “humanized” immunoglobulin variable region is an immunoglobulin variable region that is modified to include a sufficient number of human framework amino acid positions such that the immunoglobulin variable region does not elicit an immunogenic response in a normal human. Descriptions of “humanized” immunoglobulins include, for example, U.S. Pat. No. 6,407,213 and U.S. Pat. No. 5,693,762.

[0076] As used herein, “binding affinity” refers to the apparent association constant or Kₐ. The Kₐ is the reciprocal of the dissociation constant (K_{d}). A binding protein may, for example, have a binding affinity of at least 10⁵, 10⁶, 10⁷, 10⁸, 10⁹, 10¹⁰ and 10¹¹ M⁻¹ for a particular target molecule, e.g., MMP-9, MMP-16, or MMP-24. Higher affinity binding of a binding protein to a first target relative to a second target can be indicated by a higher Kₐ (or a smaller numerical value K_{d}) for binding the first target than the Kₐ (or numerical value K_{d}) for binding the second target. In such cases, the binding protein has specificity for the first target (e.g., a protein in a first conformation or mimic thereof) relative to the second target (e.g., the same protein in a second conformation or mimic thereof; or a second protein). Differences in binding affinity (e.g., for specificity or other comparisons) can be at least 1.5, 2, 3, 4, 5, 10, 15, 20, 37.5, 50, 70, 80, 91, 100, 500, 1000, or 105 fold.

[0077] Binding affinity can be determined by a variety of methods including equilibrium dialysis, equilibrium binding, gel filtration, ELISA, surface plasmon resonance, or spectroscopy (e.g., using a fluorescence assay). Exemplary conditions for evaluating binding affinity are in TRIS-buffer (50 mM TRIS, 150 mM NaCl, 5 mM CaCl₂ at pH7.5). These techniques can be used to measure the concentration of bound and free binding protein as a function of binding protein (or target) concentration. The concentration of bound binding protein ([Bound]) is related to the concentration of free binding protein ([Free]) and the concentration of binding sites for the binding protein on the target where (N) is the number of binding sites per target molecule by the following equation:

[Bound]═N·[Free]/((1/Ka)+[Free]).

[0078] It is not always necessary to make an exact determination of Kₐ, though, since sometimes it is sufficient to obtain a quantitative measurement of affinity, e.g., determined using a method such as ELISA or FACS analysis, is proportional to Kₐ, and thus can be used for comparisons, such as determining whether a higher affinity is, e.g., 2-fold higher, to obtain a qualitative measurement of affinity, or to obtain an inference of affinity, e.g., by activity in a functional assay, e.g., an in vitro or in vivo assay.

[0079] An “isolated composition” refers to a composition (e.g., protein) that is removed from at least 90% of at least one component of a natural sample from which the isolated composition can be obtained. Compositions produced artificially or naturally can be “compositions of at least” a certain degree of purity if the species or population of species of interests is at least 5, 10, 25, 50, 75, 80, 90, 92, 95, 98, or 99% pure on a weight-weight basis.

[0080] An “epitope” refers to the site on a target compound that is bound by a binding protein (e.g., an antibody such as a Fab or full length antibody). In the case where the target compound is a protein, the site can be entirely composed of amino acid components, entirely composed of chemical modifications of amino acids of the protein (e.g., glycosyl moieties), or composed of combinations thereof. Overlapping epitopes include at least one common amino acid residue, glycosyl group, phosphate group, sulfate group, or other molecular feature.

[0081] Calculations of “homology” or “sequence identity” between two sequences (the terms are used interchangeably herein) are performed as follows. The sequences are aligned for optimal comparison purposes (e.g., gaps can be introduced in one or both of a first and a second amino acid or nucleic acid sequence for optimal alignment and non-homologous sequences can be disregarded for comparison purposes). The optimal alignment is determined as the best score using the GAP program in the GCG software package with a Blossum 62 scoring matrix with a gap penalty of 12, a gap extend penalty of 4, and a frameshift gap penalty of 5. The amino acid residues or nucleotides at corresponding amino acid positions or nucleotide positions are then compared. When a position in the first sequence is occupied by the same amino acid residue or nucleotide as the corresponding position in the second sequence, then the molecules are identical at that position (as used herein amino acid or nucleic acid “identity” is equivalent to amino acid or nucleic acid “homology”). The percent identity between the two sequences is a function of the number of identical positions shared by the sequences.

[0082] In a preferred embodiment, the length of a reference sequence aligned for comparison purposes is at least 30%, preferably at least 40%, more preferably at least 50%, even more preferably at least 60%, and even more preferably at least 70%, 80%, 85%, 90%, 91%, 92%, 93%, 94%, 95%, 96%, 97%, 98%, 99%, or 100% of the length of the reference sequence. For example, the reference sequence may be the length of the immunoglobulin variable domain sequence.

[0083] As used herein, the term “substantially identical” (or “substantially homologous”) is used herein to refer to a first amino acid or nucleic acid sequence that contains a sufficient number of identical or equivalent (e.g., with a similar side chain, e.g., conserved amino acid substitutions) amino acid residues or nucleotides to a second amino acid or nucleic acid sequence such that the first and second amino acid or nucleic acid sequences have (or encode proteins having) similar activities, e.g., a binding activity, a binding preference, or a biological activity. In the case of antibodies, the second antibody has the same specificity and has at least 50%, at least 25%, or at least 10% of the affinity relative to the same antigen.

[0084] Sequences similar or homologous (e.g., at least about 85% sequence identity) to the sequences disclosed herein are also part of this application. In some embodiments, the sequence identity can be about 85%, 90%, 91%, 92%, 93%, 94%, 95%, 96%, 97%, 98%, 99% or higher. In addition, substantial identity exists when the nucleic acid segments hybridize under selective hybridization conditions (e.g., highly stringent hybridization conditions), to the complement of the strand. The nucleic acids may be present in whole cells, in a cell lysate, or in a partially purified or substantially pure form.

[0085] As used herein, the term “hybridizes under low stringency, medium stringency, high stringency, or very high stringency conditions” describes conditions for hybridization and washing. Guidance for performing hybridization reactions can be found in Current Protocols in Molecular Biology, John Wiley & Sons, N.Y. (1989), 6.3.1-6.3.6. Aqueous and nonaqueous methods are described in that reference and either can be used. Specific hybridization conditions referred to herein are as follows: (1) low stringency hybridization conditions in 6× sodium chloride/sodium citrate (SSC) at about 45° C., followed by two washes in 0.2×SSC, 0.1% SDS at least at 50° C. (the temperature of the washes can be increased to 55° C. for low stringency conditions); (2) medium stringency hybridization conditions in 6×SSC at about 45° C., followed by one or more washes in 0.2×SSC, 0.1% SDS at 60° C.; (3) high stringency hybridization conditions in 6×SSC at about 45° C., followed by one or more washes in 0.2×SSC, 0.1% SDS at 65° C.; and (4) very high stringency hybridization conditions are 0.5M sodium phosphate, 7% SDS at 65° C., followed by one or more washes at 0.2×SSC, 1% SDS at 65° C. Very high stringency conditions (4) are the preferred conditions and the ones that should be used unless otherwise specified. The disclosure includes nucleic acids that hybridize with low, medium, high, or very high stringency to a nucleic acid described herein or to a complement thereof, e.g., nucleic acids encoding a binding protein described herein. The nucleic acids can be the same length or within 30, 20, or 10% of the length of the reference nucleic acid. The nucleic acid can correspond to a region encoding an immunoglobulin variable domain sequence described herein.

[0086] An MMP-12 binding protein may have mutations (e.g., at least one, two, or four, and/or less than 15, 10, 5, or 3) relative to a binding protein described herein (e.g., conservative or non-essential amino acid substitutions), which do not have a substantial effect on protein function. Whether or not a particular substitution will be tolerated, i.e., will not adversely affect biological properties, such as binding activity can be predicted, e.g., by evaluating whether the mutation is conservative or by the method of Bowie, et al. (1990) Science 247:1306-1310.

[0087] A “conservative amino acid substitution” is one in which the amino acid residue is replaced with an amino acid residue having a similar side chain. Families of amino acid residues having similar side chains have been defined in the art. These families include amino acids with basic side chains (e.g., lysine, arginine, histidine), acidic side chains (e.g., aspartic acid, glutamic acid), uncharged polar side chains (e.g., glycine, asparagine, glutamine, serine, threonine, tyrosine, cysteine), nonpolar side chains (e.g., alanine, valine, leucine, isoleucine, proline, phenylalanine, methionine, tryptophan), beta-branched side chains (e.g., threonine, valine, isoleucine) and aromatic side chains (e.g., tyrosine, phenylalanine, tryptophan, histidine). It is possible for many framework and CDR amino acid residues to include one or more conservative substitutions.

[0088] Motif sequences for biopolymers can include positions which can be varied amino acids. For example, the symbol “X” in such a context generally refers to any amino acid (e.g., any of the twenty natural amino acids or any of the nineteen non-cysteine amino acids). Other allowed amino acids can also be indicated for example, using parentheses and slashes. For example, “(A/W/FIN/Q)” means that alanine, tryptophan, phenylalanine, asparagine, and glutamine are allowed at that particular position.

[0089] A “non-essential” amino acid residue is a residue that can be altered from the wild-type sequence of the binding agent, e.g., the antibody, without abolishing or more preferably, without substantially altering a biological activity, whereas changing an “essential” amino acid residue results in a substantial loss of activity.

[0090] The term “cognate ligand” refers to a naturally occurring ligand of an MMP-12, including naturally occurring variants thereof (e.g., splice variants, naturally occurring mutants, and isoforms).

[0091] Statistical significance can be determined by any art known method. Exemplary statistical tests include: the Students T-test, Mann Whitney U non-parametric test, and Wilcoxon non-parametric statistical test. Some statistically significant relationships have a P value of less than 0.05 or 0.02. Particular binding proteins may show a difference, e.g., in specificity or binding, that are statistically significant (e.g., P value <0.05 or 0.02). The terms “induce”, “inhibit”, “potentiate”, “elevate”, “increase”, “decrease” or the like, e.g., which denote distinguishable qualitative or quantitative differences between two states, and may refer to a difference, e.g., a statistically significant difference, between the two states.

### MMP-12 Binding Proteins

[0092] The disclosure provides proteins that bind to MMP-12 (e.g., human MMP-12 and/or murine MMP-12) and include at least one immunoglobin variable region. For example, the MMP-12 binding protein includes a heavy chain (HC) immunoglobulin variable domain sequence and a light chain (LC) immunoglobulin variable domain sequence. A number of exemplary MMP-12 binding proteins are described herein.

[0093] The MMP-12 binding protein may be an isolated protein (e.g., at least 70, 80, 85, 90, 91, 92, 93, 94, 95, 96, 97, 98, or 99% free of other proteins).

[0094] The MMP-12 binding protein may additionally inhibit MMP-12, e.g., human and/or murine MMP-12. The binding protein can inhibit the catalytic activity of MMP-12 (e.g., human MMP-12). In one embodiment, the protein binds the catalytic domain of human MMP-12, e.g., the protein contacts residues in or near the active site of MMP-12. In some embodiments, the protein does not contact residues in or near the active site of MMP-12 but instead binds elsewhere on MMP-12 and causes a steric change in MMP-12 that affects (e.g., inhibits) its activity.

[0095] Exemplary MMP-12 binding proteins include M0134-A02, M134-A05, M134-A07, M134-A09, M134-A10, M134-A 11, M0134-B01, M134-B04, M0134-B08, M0134-B 11, M0134-C01, M0134-C02, M0134-C06, M0134-C09, M0134-C10, M0134-C11, M0134-C12, M0134-D02, M0134-DO3, M0134-E04, M0134-E07, M0134-E08, M134-E11, M0134-F01, M0134-F05, M0134-G02, M0134-G04, M0134-G07, M0135-A03, M0135-A05, M0135-A06, M0135-A07, M0135-B02, M0135-B08, M0135-C01, M0135-C11, M0135-E03, M0135-F03, M0135-F11, M0135-G02, M0135-G03, M0135-G07, M0135-G11, M0135-H03, M0135-H10, M0105-C05, M0105-E11, M0105-F08, M0107-A12, M0108-A02, M0109-G11, M0110-G05, M0129-B11, M0130-A01, M0130-C12, M0130-F06, M0130-H04, M0131-A06, M0131-D03, M0132-A04, M0133-B08, M0133-E05, M0121-E07, M0118-F11, M0125-G07, M0124-E07, M0119-D01, M0119-A02, M0122-C06, M0123-G07, M0063-A02, M0063-A04, M0063-B01, M0063-B11, M0063-C07, M0063-G01, M0065-E12, M0065-G03, M0065-H05, M0067-A02, M0067-B06, M0067-B09, M0067-C10, M0067-F02, M0067-F06, M0069-A04, M0069-A11, M0069-C02, M0069-D10, M0069-G07, M0071-A01, M0071-B07, M0071-D05, M0071-D09, M0071-H03, M0071-H06, M0087-F09, M0088-F07, M0088-G10, M0088-H10, M0089-C01, M0089-F05, M0089-B07, M0089-H11, M0034-C04, M0039-F01, M0041-B05, M0041-G01, M0042-B06, M0006-B10, M0007-H06, M0008-H09, M0009-H08, M0011-H11, M0015-F02, M0016-D01, M0013-D11, M0013-G12, M0013-H06, M0014-C09, M0014-G11, M0016-A11, M0016-H05, M0019-C05, M0020-B01, M0022-C07, M0025-D04 and M0027-E11. Preferably, the MMP-12 binding protein is M0030-A10, M0008-H09, M0032-H09, M0038-A03, M0038-H04, M0039-B02, M0040-B05, M0041-A05, R011-B11, M0007-A10 (also referred to as M7A10) or M0008-E08 (also referred to as M8E8).

[0096] MMP-12 binding proteins may be antibodies. MMP-12 binding antibodies may have their HC and LC variable domain sequences included in a single polypeptide (e.g., scFv), or on different polypeptides (e.g., IgG or Fab).

### Matrix Metalloproteinase 12 (MMP-12)

[0097] MMP-12 Sequences. MMP-12 is encoded by a gene designated as MMP12 with full name Matrix metalloproteinase-12 precursor. Synonyms for MMP-12 include matrix metalloproteinase 12, macrophage elastase, macrophage metalloelastase. The DNA sequence is known for Homo sapiens and Mus musculus. An exemplary cDNA sequence encoding human MMP12 and the amino acid sequence are shown below. Exemplary cDNA sequences encoding murine MMP12 and amino acid sequences are also shown below. An exemplary MMP-12 protein can include the human or mouse MMP-12 amino acid sequence, a sequence that is 80%, 85%, 90%, 95%, 96%, 97%, 98%, or 99% identical to one of these sequences, or a fragment thereof, e.g., a fragment without the signal sequence or prodomain.

cDNA and amino acid sequences of human MMP12
>emb1|BC112301|BC112301 Homo sapiens matrix metallopeptidase 12
(macrophage elastase), mRNA (cDNA clone MGC: 138506 IMAGE: 8327769),
complete cds
atgaagtttcttctaatactgct
cctgcaggccactgcttctggagctcttcccctgaacagctctacaagcctggaaaaaaa
taatgtgctatttggtgaaagatacttagaaaaattttatggccttgagataaacaaact
tccagtgacaaaaatgaaatatagtggaaacttaatgaaggaaaaaatccaagaaatgca
gcacttcttgggtctgaaagtgaccgggcaactggacacatctaccctggagatgatgca
cgcacctcgatgtggagtccccgatgtccatcatttcagggaaatgccaggggggcccgt
atggaggaaacattatatcacctacagaatcaataattacacacctgacatgaaccgtga
ggatgttgactacgcaatccggaaagctttccaagtatggagtaatgttacccccttgaa
attcagcaagattaacacaggcatggctgacattttggtggtttttgcccgtggagctca
tggagacttccatgcttttgatggcaaaggtggaatcctagcccatgcttttggacctgg
atctggcattggaggggatgcacatttcgatgaggacgaattctggactacacattcagg
aggcacaaacttgttcctcactgctgttcacgagattggccattccttaggtcttggcca
ttctagtgatccaaaggccgtaatgttccccacctacaaatatgttgacatcaacacatt
tcgcctctctgctgatgacatacgtggcattcagtccctgtatggagacccaaaagagaa
ccaacgcttgccaaatcctgacaattcagaaccagctctctgtgaccccaatttgagttt
tgatgctgtcactaccgtgggaaataagatctttttcttcaaagacaggttcttctggct
gaaggtttctgagagaccaaagaccagtgttaatttaatttcttccttatggccaacctt
gccatctggcattgaagctgcttatgaaattgaagccagaaatcaagtttttctttttaa
agatgacaaatactggttaattagcaatttaagaccagagccaaattatcccaagagcat
acattcttttggttttcctaactttgtgaaaaaaattgatgcagctgtttttaacccacg
tttttataggacctacttctttgtagataaccagtattggaggtatgatgaaaggagaca
gatgatggaccctggttatcccaaactgattaccaagaacttccaaggaatcgggcctaa
aattgatgcagtcttctactctaaaaacaaatactactatttcttccaaggatctaacca
atttgaatatgacttcctactccaacgtatcaccaaaacactgaaaagcaatagctggtt
tggttgttagaaatggtgtaattaatggtttttgttagttcacttcagcttaataagtat
ttattgcatatttgctatgtcctcagtgtaccactacttagagatatgtatcataaaaat
aaaatctgtaaaccataggtaatgattatataaaatacataatatttttcaattttgaaa
actctaattgtccattcttgcttgactctactattaagtttgaaaatagttaccttcaaa
ggccaagagaattctatttgaagcatgctctgtaagttgcttcctaacat
>Amino acid sequence of human MMP12 (AAI12302.1)
MKFLLILLLQATASGALPLNSSTSLEKNNVLFGERYLEKFYGLEINKLPVTKMKYSGNLM
KEKIQEMQHFLGLKVTGQLDTSTLEMMHAPRCGVPDVHHFREMPGGPVWRKHYITYRINN
YTPDMNREDVDYAIRKAFQVWSNVTPLKFSKINTGMADILVVFARGAHGDFHAFDGKGGI
LAHAFGPGSGIGGDAHFDEDEFWTTHSGGTNLFLTAVHEIGHSLGLGHSSDPKAVMFPTY
KYVDINTFRLSADDIRGIQSLYGDPKENQRLPNPDNSEPALCDPNLSFDAVTTVGNKIFF
FKDRFFWLKVSERPKTSVNLISSLWPTLPSGIEAAYEIEARNQVFLFKDDKYWLISNLRP
EPNYPKSIHSFGFPNFVKKIDAAVFNPRFYRTYFFVDNQYWRYDERRQMMDPGYPKLITK
NFQGIGPKIDAVFYSKNKYYYFFQGSNQFEYDFLLQRITKTLKSNSWFGC

[0098] Polymorphisms in the MMP-12 gene are described, for example, in (2002) J Am Coll Cardiol. 3:40(1):43-8, (2002) Hum Mol. Genet. 1:11(5):569-76., (2001) Stroke 32(9):2198-202., and (2000) Circ Res. 86(9):998-1003.

| cDNA and amno acid sequences of mouse MMP12 | |
|---|---|
| > Mouse MMP-12 cDNA sequence (NM_008605) | |
| 1 | ACTCTGCTGAAAGGAGTCTGCACAATGAAATTTCTCATGATGATTGTGTTCTTACAGGTA |
| 61 | TCTGCCTGTGGGGCTGCTCCCATGAATGACAGTGAATTTGCTGAATGGTACTTGTCAAGA |
| 121 | TTTTATGATTATGGAAAGGACAGAATTCCAATGACAAAAACAAAAACCAATAGAAACTTC |
| 181 | CTAAAAGAAAAACTCCAGGAAATGCAGCAGTTCTTTGGGCTAGAAGCAACTGGGCAACTG |
| 241 | GACAACTCAACTCTGGCAATAATGCACATCCCTCGATGTGGAGTGCCCGATGTACAGCAT |
| 301 | CTTAGAGCAGTGCCCCAGAGGTCAAGATGGATGAAGCGGTACCTCACTTACAGGATCTAT |
| 361 | AATTACACTCCGGACATGAAGCGTGAGGATGTAGACTACATATTTCAGAAAGCTTTCCAA |
| 421 | GTCTGGAGTGATGTGACTCCTCTAAGATTCAGAAAGCTTCATAAAGATGAGGCTGACATT |
| 481 | ATGATACTTTTTGCATTTGGAGCTCACGGAGACTTCAACTATTTTGATGGCAAAGGTGGT |
| 541 | ACACTAGCCCATGCTTTTTATCCTGGACCTGGTATTCAAGGAGATGCACATTTTGATGAG |
| 601 | GCAGAAACGTGGACTAAAAGTTTTCAAGGCACAAACCTCTTCCTTGTTGCTGTTCATGAA |
| 661 | CTTGGCCATTCCTTGGGGCTGCAGCATTCCAATAATCCAAAGTCAATAATGTACCCCACC |
| 721 | TACAGATACCTTAACCCCAGCACATTTCGCCTCTCTGCTGATGACATACGTAACATTCAG |
| 781 | TCCCTCTATGGAGCCCCAGTGAAACCCCCATCCTTGACAAAACCTAGCAGTCCACCATCA |
| 841 | ACTTTCTGTCACCAAAGCTTGAGTTTTGATGCTGTCACAACAGTGGGAGAGAAAATCTTT |
| 901 | TTCTTTAAAGACTGGTTCTTCTGGTGGAAGCTTCCTGGGAGTCCAGCCACCAACATTACT |
| 961 | TCTATTTCTTCCATATGGCCAAGCATCCCATCTGGTATTCAAGCTGCTTACGAAATTGAA |
| 1021 | AGCAGAAATCAACTTTTCCTTTTTAAAGATGAGAAGTACTGGTTAATAAACAACTTAGTA |
| 1081 | CCAGAGCCACACTATCCCAGGAGCATATATTCCCTGGGCTTCTCTGCATCTGTGAAGAAG |
| 1141 | GTTGATGCAGCTGTCTTTGACCCACTTCGCCAAAAGGTTTATTTCTTTGTGGATAAACAC |
| 1201 | TACTGGAGGTATGATGTGAGGCAGGAGCTCATGGACCCTGCTTACCCCAAGCTGATTTCC |
| 1261 | ACACACTTCCCAGGAATCAAGCCTAAAATTGATGCAGTCCTCTATTTCAAAAGACACTAC |
| 1321 | TACATCTTCCAAGGAGCCTATCAATTGGAATATGACCCCCTGTTCCGTCGTGTCACCAAA |
| 1381 | ACATTGAAAAGTACAAGCTGGTTTGGTTGT |

>Amino acid sequence of mouse MMP12 (based on accession number
NM_008605)
MKFLMMIVFLQVSACGAAPMNDSEFAEWYLSRFYDYGKDRIPMTKTKTN
RNFLKEKLQEMQQFFGLEATGQLDNSTLAIMHIPRCGVPDVQHLRAVPQ
RSRWMKRYLTYRIYNYTPDMKREDVDYIFQKAFQVWSDVTPLRFRKLHK
DEADIMILFAFGAHGDFNYFDGKGGTLAHAFYPGPGIQGDAHFDEAETW
TKSFQGTNLFLVAVHELGHSLGLQHSNNPKSIMYPTYRYLNPSTFRLSA
DDIRNIQSLYGAPVKPPSLTKPSSPPSTFCHQSLSFDAVTTVGEKIFFF
KDWFFWWKLPGSPATNITSISSIWPSIPSGIQAAYEIESRNQLFLFKDE
KYWLINNLVPEPHYPRSIYSLGFSASVKKVDAAVFDPLRQKVYFFVDKH
YWRYDVRQELMDPAYPKLISTHFPGIKPKIDAVLYFKRHYYIFQGAYQL
EYDPLFRRVTKTLKSTSWFGC

[0099] Factors that regulate MMP-12. Expression of MMP-12 is regulated by many factors. Reports of upregulation include: Oncogene. 2004 Jan. 22; 23(3):845-51. (recurrence in stage I lung cancer, 2/10 cases), Ann Neurol. 2003 June; 53(6):731-42. (collagenase-induced rat model of intracerebral hemorrhage), Cancer Res. 2005 May 15; 65(10):4261-72. (protein kinase C/p53 resistant cells), Br J. Dermatol. 2005 April; 152(4):720-6. (Samples from nine patients with squamous cell carcinoma), Cardiovasc Res. 2005 May 1; 66(2):410-9. (Aging), J. Immunol. 2005 Apr. 15; 174(8):4953-9. (Surfactant protein D−/− mice), J Biol. Chem. 2005 Jun. 3; 280(22):21653-60. (Corneal wound repair), Surgery. 2005 April; 137(4):457-62. (periaortic application of CaCl₂ in mice), J. Virol. 2005 April; 79(8):4764-73. (murine viral encephalitis), Biochem Biophys Res Commun. 2005 Apr. 29; 330(1):194-203. (cigarette smoke condensate in mice), Inflamm Res. 2005 January; 54(1):31-6. (bronchoalveolar lavage and lung tissue from COPD patients), Am J Respir Cell Mol. Biol. 2005 April; 32(4):311-8. (Induction of human IL-1 beta in transgenic mice), Toxicol Pathol. 2004 May-June; 32(3):351-6. (Cigarette smoke in mice), Am J Physiol Lung Cell Mol. Physiol. 2004 April; 286(4):L801-7. (lysosomal acid lipase gene knockout mice), J. Neurosci. 2004 Feb. 11; 24(6):1521-9. (A1 adenosine receptor null mice), J. Neuroimmunol. 1998 Jul. 1; 87(1-2):62-72. (experimentally-induced delayed type hypersensitivity model of MS), Scand J. Immunol. 2005 January; 61(1):10-7. (IL-4), J Pediatr Gastroenterol Nutr. 2005 January; 40(1):60-6. (Enterocolitis), J Cell Physiol. 2005 July; 204(1):139-45. (Statins), J. Immunol. 2004 Oct. 15; 173(8):5209-18. (experimental autoimmune encephalomyelitis), J Cardiovasc Pharmacol. 2004 July; 44(1):57-65. (hypercholesterolemic hamsters with endothelial injury in the carotid artery), Cancer Metastasis Rev. 2004 January-June; 23(1-2):101-17. (colorectal cancer), Free Radic Biol Med. 2004 Mar. 15; 36(6):782-801. (oxidative stress), Chest. 2004 February; 125(2):466-72. (Wood smoke, cigarette smoke, CPOD).

[0100] Down regulation or no upregulation is reported in Inflammation. 2003 April; 27(2):107-13. (Mice immunized with type II collagen), Cancer Res. 2003 Jan. 1; 63(1):256-62. (Epstein-Barr virus proteins; nasopharyngeal carcinoma), Curr Eye Res. 1998 February; 17(2):132-40. (human interphotoreceptor matrix and vitreous from postmortem human eyes), and Scand J. Immunol. 2005 January; 61(1):10-7 (dexamethasone).

[0101] Endogenous inhibitors of MMP-12. MMP-12 has a number of endogenous inhibitors. Like other MMPs, MMP-12 is inhibited by TIMPs (Murphy, G., and Willenbrock, F. (1995) Methods Enzymol. 248, 496-510).

[0102] Small molecule inhibitors of MMP-12. Small molecule inhibitors of MMP-12 have been synthesized and tested. Most of these have either insufficient potency or insufficient specificity, or both. The reports include: Proc Natl Acad Sci USA. 2005 Apr. 12; 102(15):5334-9. (acetohydroxamic acid and N-isobutyl-N-[4-methoxyphenylsulfonyl]glycyl hydroxamic acid); Arthritis Rheum. 2004 October; 50(10):3275-85. (a general hydroxamate inhibitor of MMP activity); Arch Biochem Biophys. 2003 Jan. 15; 409(2):335-40. (peptide lin24); J Mol. Biol. 2001 Sep. 28; 312(4):743-51. (hydroxamic acid inhibitor, CGS27023A); J Mol. Biol. 2001 Sep. 28; 312(4):731-42. (batimastat (BB-94)); Anticancer Res. 2001 January-February; 21(1A): 145-55. (AE-941, an orally bioavailable extract made of cartilage); J Comb Chem. 2000 November-December; 2(6):624-38. (XXX-Gpsi(PO2H—CH2)L-XXX library on beads); Biochim Biophys Acta. 2000 Mar. 16; 1478(1):51-60. (green tea polyphenols); J Leukoc Biol. 1984 May; 35(5):449-57. (peptide chloromethyl ketone); Am Rev Respir Dis. 1982 February; 125(2):203-7. (a battery of elastase inhibitors); Mem Inst Oswaldo Cruz. 2005 March; 100:167-172. (marimastat); J Mol. Biol. 2004 Aug. 20; 341(4):1063-76. (CP-271485, PF-00356231, and PD-0359601); Inflamm Res. 2003 March; 52(3):95-100.¹; Bioorg Med Chem Lett. 2004 Oct. 4; 14(19):4935-9. (inhibitors with novel oxazoline zinc binding groups); and J Cardiovasc Pharmacol. 2004 July; 44(1):57-65. (ONO-4817). Other small molecule inhibitors of MMP-12 are described, e.g., in US Patent Application No: 20050014817 (Fluorothiophene derivatives), US Patent Application No.: 20050014816 (Thiophene amino acid derivatives), U.S. Pat. No. 6,770,640 (1-Carboxylmethyl-2-oxo-azepan derivatives), PCT Publication No.: WO200040577 (1-Carboxymethyl-2-Oxo-Azepan Derivatives), PCT Publication No.: WO 200532541 (Substituted Heterocyclic Mercaptosulfide Inhibitors), PCT Publication No.: WO 200183431, US Patent Application 20030158155, European Patent No.: 1288199, PCt Publication No.: WO 200040600 and U.S. Pat. No. 6,352,976, U.S. Pat. No. 6,350,907, U.S. Pat. No. 6,924,276, U.S. Pat. No. 6,916,807, U.S. Pat. No. 6,686,355, U.S. Pat. No. 6,548,477 and U.S. Pat. No. 5,506,242. The small molecule can be administered to inhibit MMP-12, e.g., in combination with a MMP-12 binding protein described herein.

[0103] Small interfering RNA inhibitors of MMP-12. MMP-12 can be inhibited by small interfering RNA (siRNA). Examples of siRNA that can be used are described in US Patent Publication No.: 20040087533 and PCt Publication No.: WO 200409098. The siRNA can be administered to inhibit MMP-12, e.g., in combination with a MMP-12 binding protein described herein.

[0104] Drug Conjugates

[0105] The MMP-12 binding proteins described herein can be conjugated to a drug (e.g., a cytotoxic, cytostatic, or immunomodulatory agent). The conjugates can be used therapeutically or prophylactically, e.g., the binding protein can target the drug, e.g., in vivo, e.g., to a site of disease (e.g., a tumor or site of inflammation), e.g., such that the drug affects the site of disease (e.g., causes a cytostatic or cytotoxic effect on targeted cells).

[0106] In some embodiments, the binding protein itself has therapeutic or prophylactic efficacy (e.g., the protein can modulate (e.g., antagonize) MMP-12, or cause a cytostatic or cytotoxic effect on a cell that expresses MMP-12 (e.g., an endothelial cell or tumor cell)). The binding protein-drug conjugate can be used such that the binding protein and drug both contribute (e.g., additively or synergistically) to an effect on MMP-12 (e.g., a therapeutic effect, e.g., in vivo, e.g., to a site of disease (e.g., a tumor or site of undesired angiogenesis or vascularization). The drug and/or binding protein can be, for example, cytotoxic, cytostatic or otherwise prevent or reduce the ability of a targeted cell to divide and/or survive (e.g., when the drug is taken up or internalized by the targeted cell and/or upon binding of the binding protein to MMP-12). For example, if the targeted cell is a cancer cell, the drug and/or binding protein can prevent or reduce the ability of the cell to divide and/or metastasize.

[0107] Useful classes of drugs that can be used in the binding protein-drug conjugates described herein include cytotoxic or immunomodulatory agents such as, for example, antitubulin agents, auristatins, DNA minor groove binders, DNA replication inhibitors, alkylating agents (e.g., platinum complexes such as cis-platin, mono(platinum), bis(platinum) and tri-nuclear platinum complexes and carboplatin), anthracyclines, antibiotics, antifolates, antimetabolites, chemotherapy sensitizers, duocarmycins, etoposides, fluorinated pyrimidines, ionophores, lexitropsins, nitrosoureas, platinols, pre-forming compounds, purine antimetabolites, puromycins, radiation sensitizers, steroids, taxanes, topoisomerase inhibitors, vinca alkaloids, or the like.

[0108] Individual cytotoxic or immunomodulatory agents include, for example, an androgen, anthramycin (AMC), asparaginase, 5-azacytidine, azathioprine, bleomycin, busulfan, buthionine sulfoximine, camptothecin, carboplatin, carmustine (BSNU), CC-1065, chlorambucil, cisplatin, colchicine, cyclophosphamide, cytarabine, cytidine arabinoside, cytochalasin B, dacarbazine, dactinomycin (actinomycin), daunorubicin, decarbazine, docetaxel, doxorubicin, an estrogen, 5-fluorodeoxyuridine, 5-fluorouracil, gramicidin D, hydroxyurea, idarubicin, ifosfamide, irinotecan, lomustine (CCNU), mechlorethamine, melphalan, 6-mercaptopurine, methotrexate, mithramycin, mitomycin C, mitoxantrone, nitroimidazole, paclitaxel, plicamycin, procarbazine, rapamycin (Sirolimus), streptozotocin, tenoposide, 6-thioguanine, thioTEPA, topotecan, vinblastine, vincristine, vinorelbine, VP-16 and VM-26.

[0109] In some typical embodiments, the drug comprises a cytotoxic agent. Suitable cytotoxic agents include, for example, dolastatins (e.g., auristatin E, AFP, MMAF, MMAE), DNA minor groove binders (e.g., enediynes and lexitropsins), duocarmycins, taxanes (e.g., paclitaxel and docetaxel), puromycins, vinca alkaloids, CC-1065, SN-38, topotecan, morpholino-doxorubicin, rhizoxin, cyanomorpholino-doxorubicin, echinomycin, combretastatin, netropsin, epothilone A and B, estramustine, cryptophysins, cemadotin, maytansinoids, discodermolide, eleutherobin, and mitoxantrone.

[0110] In some embodiments, the drug is a cytotoxic agent such as AFP, MMAF, MMAE, AEB, AEVB, auristatin E, paclitaxel, docetaxel, CC-1065, SN-38, topotecan, morpholino-doxorubicin, rhizoxin, cyanomorpholino-doxorubicin, dolastatin-10, echinomycin, combretatstatin, chalicheamicin, maytansine, DM-1, or netropsin.

[0111] In some embodiments, the drug is a cytotoxic agent that comprises a conventional chemotherapeutic such as, for example, doxorubicin, paclitaxel, melphalan, vinca alkaloids, methotrexate, mitomycin C or etoposide. In some embodiments, the drug can be a combined therapy, such as CHOP (Cyclophosphamide, Doxorubicin, Prednisolone and Vincristine), CHOP—R (Cyclophosphamide, Doxorubicin Vincristine, Prednisolone, and rituximab) or ABVD (Doxorubicin, Bleomycin, Vinblastine and Dacarbazine). Agents such as CC-1065 analogues (e.g., DC1), calicheamicin, maytansine, analogues of dolastatin 10, rhizoxin, and palytoxin can also be used.

[0112] In specific embodiments, the drug can be a cytotoxic or cytostatic agent that comprises auristatin E (also known in the art as dolastatin-10) or a derivative thereof. Typically, the auristatin E derivative is, e.g., an ester formed between auristatin E and a keto acid. For example, auristatin E can be reacted with paraacetyl benzoic acid or benzoylvaleric acid to produce AEB and AEVB, respectively. Other auristatin derivatives include AFP, MMAF, and MMAE. The synthesis and structure of auristatin E and its derivatives are described in US 20030083263 and US 20050009751, and U.S. Pat. Nos. 6,323,315; 6,239,104; 6,034,065; 5,780,588; 5,665,860; 5,663,149; 5,635,483; 5,599,902; 5,554,725; 5,530,097; 5,521,284; 5,504,191; 5,410,024; 5,138,036; 5,076,973; 4,986,988; 4,978,744; 4,879,278; 4,816,444; and 4,486,414. In some preferred embodiments, MMAF or AFP is used.

[0113] In specific embodiments, the drug is a cytotoxic agent that comprises a DNA minor groove binding agent. See, e.g., U.S. Pat. No. 6,130,237. For example, in some embodiments, the minor groove binding agent is a CBI compound. In other embodiments, the minor groove binding agent is an enediyne (e.g., calicheamicin).

[0114] Examples of anti-tubulin agents that can be used in the MMP-12 binding protein-drug conjugates include, but are not limited to, taxanes (e.g., TAXOL® (paclitaxel), TAXOTERE® (docetaxel)), T67 (Tularik), vinca alkyloids (e.g., vincristine, vinblastine, vindesine, and vinorelbine), and dolastatins (e.g., auristatin E, AFP, MMAF, MMAE, AEB, AEVB). Other antitubulin agents include, for example, baccatin derivatives, taxane analogs (e.g., epothilone A and B), nocodazole, colchicine and colcimid, estramustine, cryptophysins, cemadotin, maytansinoids, combretastatins, discodermolide, eleutherobin, rhizoxin/maytansine, auristatin dolastatin 10 MMAE, and peloruside A.

[0115] In some embodiments, the drug is a cytotoxic agent such as an anti-tubulin agent. In some embodiments, the anti-tubulin agent is an auristatin, a vinca alkaloid, a podophyllotoxin, a taxane, a baccatin derivative, a cryptophysin, a maytansinoid, a combretastatin, or a dolastatin. In some embodiments, the antitubulin agent is AFP, MMAP, MMAE, AEB, AEVB, auristatin E, vincristine, vinblastine, vindesine, vinorelbine, VP-16, camptothecin, paclitaxel, docetaxel, epothilone A, epothilone B, nocodazole, colchicines, colcimid, estramustine, cemadotin, discodermolide, maytansine, DM1, DM2, DM3, DM4, or eleutherobin.

[0116] In some embodiments, the cytotoxic agent comprises a maytansinoid, another group of anti-tubulin agents. For example, in specific embodiments, the maytansinoid is maytansine or DM-1 (ImmunoGen, Inc.; see also Chari et al. Cancer Res. 52:127-131 (1992)). In some embodiments, sterically hindered thiol and disulfide-containing maytansinoids in which the alpha-carbon atom bearing the sulfur atom bears one or two alkyl substituents are used in the binding protein-drug conjugate, e.g., US 2007-0292422; US 2007-0264266.

[0117] In some embodiments, the drug comprises an agent that acts to disrupt DNA. The drug may be selected from enediynes (e.g., calicheamicin and esperamicin) and non-enediyne small molecule agents (e.g., bleomycin, methidiumpropyl-EDTA-Fe(II)). Other useful drugs include daunorubicin, doxorubicin, distamycin A, cisplatin, mitomycin C, ecteinascidins, duocarmycin/CC-1065, and bleomycin/pepleomycin.

[0118] In other embodiments, the drug can comprise an alkylating agent such as Asaley NSC 167780, AZQ NSC 182986, BCNU NSC 409962, Busulfan NSC 750, carboxyphthalatoplatinum NSC 271674, CBDCA NSC 241240, CCNU NSC 79037, CHIP NSC 256927, chlorambucil NSC 3088, chlorozotocin NSC 178248, cis-platinum NSC 119875, clomesone NSC 338947, cyanomorpholinodoxorubicin NSC 357704, cyclodisone NSC 348948, dianhydrogalactitol NSC 132313, fluorodopan NSC 73754, hepsulfam NSC 329680, hycanthone NSC 142982, melphalan NSC 8806, methyl CCNU NSC 95441, mitomycin C NSC 26980, mitozolamide NSC 353451, nitrogen mustard NSC 762, PCNU NSC 95466, piperazine NSC 344007, piperazinedione NSC 135758, pipobroman NSC 25154, porfiromycin NSC 56410, spirohydantoin mustard NSC 172112, teroxirone NSC 296934, tetraplatin NSC 363812, thio-tepa NSC 6396, triethylenemelamine NSC 9706, uracil nitrogen mustard NSC 34462, or Yoshi-864 NSC 102627.

[0119] In some embodiments, the drug can comprise an antimitotic agent such as allocolchicine NSC 406042, Halichondrin B NSC 609395, colchicine NSC 757, colchicine derivative NSC 33410, dolastatin 10 NSC 376128 (NG—auristatin derived), maytansine NSC 153858, rhizoxin NSC 332598, taxol NSC 125973, taxol derivative NSC 608832, thiocolchicine NSC 361792, trityl cysteine NSC 83265, vinblastine sulfate NSC 49842, or vincristine sulfate NSC 67574.

[0120] In other embodiments, the drug can comprise an topoisomerase I inhibitor such as camptothecin NSC 94600, camptothecin, Na salt NSC 100880, aminocamptothecin NSC 603071, camptothecin derivative NSC 95382, camptothecin derivative NSC 107124, camptothecin derivative NSC 643833, camptothecin derivative NSC 629971, camptothecin derivative NSC 295500, camptothecin derivative NSC 249910, camptothecin derivative NSC 606985, camptothecin derivative NSC 374028, camptothecin derivative NSC 176323, camptothecin derivative NSC 295501, camptothecin derivative NSC 606172, camptothecin derivative NSC 606173, camptothecin derivative NSC 610458, camptothecin derivative NSC 618939, camptothecin derivative NSC 610457, camptothecin derivative NSC 610459, camptothecin derivative NSC 606499, camptothecin derivative NSC 610456, camptothecin derivative NSC 364830, camptothecin derivative NSC 606497, or morpholinodoxorubicin NSC 354646.

[0121] In other embodiments, the drug can comprise an topoisomerase II inhibitor such as doxorubicin NSC 123127, amonafide NSC 308847, m-AMSA NSC 249992, anthrapyrazole derivative NSC 355644, pyrazoloacridine NSC 366140, bisantrene HCL NSC 337766, daunorubicin NSC 82151, deoxydoxorubicin NSC 267469, mitoxantrone NSC 301739, menogaril NSC 269148, N,N-dibenzyl daunomycin NSC 268242, oxanthrazole NSC 349174, rubidazone NSC 164011, VM-26 NSC 122819, or VP-16 NSC 141540.

[0122] In other embodiments, the drug can comprise an RNA or DNA antimetabolite such as L-alanosine NSC 153353, 5-azacytidine NSC 102816, 5-fluorouracil NSC 19893, acivicin NSC 163501, aminopterin derivative NSC 132483, aminopterin derivative NSC 184692, aminopterin derivative NSC 134033, an antifol NSC 633713, an antifol NSC 623017, Baker's soluble antifol NSC 139105, dichlorallyl lawsone NSC 126771, brequinar NSC 368390, ftorafur (pro-drug) NSC 148958, 5,6-dihydro-5-azacytidine NSC 264880, methotrexate NSC 740, methotrexate derivative NSC 174121, N-(phosphonoacetyl)-L-aspartate (PALA) NSC 224131, pyrazofurin NSC 143095, trimetrexate NSC 352122, 3-HP NSC 95678, 2′-deoxy-5-fluorouridine NSC 27640, 5-HP NSC 107392, alpha-TGDR NSC 71851, aphidicolin glycinate NSC 303812, ara-C NSC 63878, 5-aza-2′-deoxycytidine NSC 127716, beta-TGDR NSC 71261, cyclocytidine NSC 145668, guanazole NSC 1895, hydroxyurea NSC 32065, inosine glycodialdehyde NSC 118994, macbecin 11 NSC 330500, pyrazoloimidazole NSC 51143, thioguanine NSC 752, or thiopurine NSC 755. See also US 2007-0292441.

[0123] The abbreviation “AFP” refers to dimethylvaline-valine-dolaisoleuine-dolaproine-phenylalanine-p-phenylened-iamine (e.g., see Formula XVI in US 2006-0233794).

[0124] The abbreviation “MAE” refers to monomethyl auristatin E (see Formula XI in US 2006-0233794).

[0125] The abbreviation “AEB” refers to an ester produced by reacting auristatin E with paraacetyl benzoic acid (e.g., see Formula XX in US 2006-0233794)

[0126] The abbreviation “AEVB” refers to an ester produced by reacting auristatin E with benzoylvaleric acid (e.g., see Formula XXI in US 2006-0233794).

[0127] The abbreviation “MMAF” refers to dovaline-valine-dolaisoleunine-dolaproine-phenylalanine (e.g., see Formula IVIV in US 2006-0233794).

[0128] The abbreviations “fk” and “phe-lys” refer to the linker phenylalanine-lysine.

[0129] The abbreviations “vc” and “val-cit” refer to the linker valine-citrulline.

[0130] In some embodiments, the drug is a cytotoxic agent selected from the group consisting of an auristatin, a DNA minor groove binding agent, a DNA minor groove alkylating agent, an enediyne, a lexitropsin, a duocarmycin, a taxane, a puromycin, a dolastatin, a maytansinoid, and a vinca alkaloid.

[0131] In some embodiments, the drug is a cytotoxic agent such as AFP or MMAF.

[0132] In some embodiments, the drug is an immunosuppressive agent such as gancyclovir, etanercept, cyclosporine, tacrolimus, rapamycin, cyclophosphamide, azathioprine, mycophenolate mofetil, methotrexate, cortisol, aldosterone, dexamethasone, a cyclooxygenase inhibitor, a 5-lipoxygenase inhibitor, or a leukotriene receptor antagonist.

[0133] See generally US 2007-0292441; US 2007-0292422; US 2007-0264266; and US 2006-0233794.

### Linkers

[0134] The binding proteins described herein can be associated with a drug to form a binding protein-drug conjugate by being linked to the drug directly. In some embodiments, the binding protein is directly conjugated to the drug. Alternatively, the binding proteins described herein can be associated with a drug to form a binding protein-drug conjugate by use of a linker region between the drug and the binding protein. In some embodiments, the binding protein is conjugated to the drug via a linker. The linker can be cleavable under intracellular conditions, e.g., such that cleavage of the linker releases the drug from the binding protein in the intracellular environment. In some embodiments, the cleavable linker is a peptide linker cleavable by an intracellular protease. In some embodiments, the peptide linker is a dipeptide linker.

[0135] In some embodiments, the dipeptide linker is a val-cit (vc) linker or a phe-lys (fk) linker. In some embodiments, the cleavable linker is hydrolyzable at a pH of less than 5.5. In some embodiments, the hydrolyzable linker is a hydrazone linker. In some embodiments, the cleavable linker is a disulfide linker.

[0136] For example, in some embodiments, the linker is cleavable by a cleaving agent that is present in the intracellular environment (e.g., within a lysosome or endosome or caveolea). The linker can be, e.g., a peptidyl linker that is cleaved by an intracellular peptidase or protease enzyme, including, but not limited to, a lysosomal or endosomal protease. In some embodiments, the peptidyl linker is at least two amino acids long or at least three amino acids long. Cleaving agents can include cathepsins B and D and plasmin, which are known to hydrolyze dipeptide drug derivatives resulting in the release of active drug inside target cells (see, e.g., Dubowchik and Walker Pharm. Therapeutics 83:67-123 (1999)). In some embodiments, peptidyl linkers are cleavable by enzymes that are present in targeted cells (e.g., cancer cells). For example, a peptidyl linker that is cleavable by the thiol-dependent protease cathepsin-B, which is highly expressed in cancerous tissue, can be used (e.g., a Phe-Leu or a Gly-Phe-Leu-Gly linker). Other such linkers are described, e.g., in U.S. Pat. No. 6,214,345. In some embodiments, the peptidyl linker cleavable by an intracellular protease is a Val-Cit (vc) linker or a Phe-Lys linker (fk) (see, e.g., U.S. Pat. No. 6,214,345, which describes the synthesis of doxorubicin with the val-cit linker). One advantage of using intracellular proteolytic release of the drug is that the drug can be attenuated when conjugated and the serum stabilities of the conjugates are typically high.

[0137] In some preferred embodiments, a vc linker is used in the binding protein-drug conjugates described herein. For example, a binding protein-vcAFP or a binding protein-vcMMAF conjugate (e.g., a MMP-12 binding protein-vcAFP or a MMP-12 binding protein-vcMMAF conjugate) is prepared.

[0138] In other embodiments, the cleavable linker is pH-sensitive, i.e., sensitive to hydrolysis at certain pH values. For example, the pH-sensitive linker is hydrolyzable under acidic conditions. For example, an acid-labile linker that is hydrolyzable in the lysosome (e.g., a hydrazone, semicarbazone, thiosemicarbazone, cis-aconitic amide, orthoester, acetal., ketal., or the like) can be used. See, e.g., U.S. Pat. Nos. 5,122,368; 5,824,805; 5,622,929; Dubowchik and Walker Pharm. Therapeutics 83:67-123 (1999); Neville et al. Biol. Chem. 264:14653-14661 (1989).

[0139] Such linkers are relatively stable under neutral pH conditions, such as those in the blood, but are unstable at below pH 5.5 or 5.0, the approximate pH of the lysosome. In certain embodiments, the hydrolyzable linker is a thioether linker (such as, e.g., a thioether attached to the therapeutic agent via an acylhydrazone bond (see, e.g., U.S. Pat. No. 5,622,929)).

[0140] In yet other embodiments, the linker is cleavable under reducing conditions (e.g., a disulfide linker). A variety of disulfide linkers are known in the art, including, for example, those that can be formed using SATA (N-succinimidyl-5-acetylthioacetate), SPDP (N-succinimidyl-3-(2-pyridyldithio)propionate), SPDB (N-succinimidyl-3-(2-pyridyldithio)butyrate) and SMPT (N-succinimidyl-oxycarbonyl-alpha-methyl-alpha-(2-pyridyl-dithio)toluene)-, SPDB and SMPT (See, e.g., Thorpe et al. Cancer Res. 47:5924-5931 (1987); Wawrzynczak et al., In Immunoconjugates: Antibody Conjugates in Radioimagery and Therapy of Cancer (C. W. Vogel ed., Oxford U. Press, 1987). See also U.S. Pat. No. 4,880,935.

[0141] In yet other embodiments, the linker is a malonate linker (Johnson et al. Anticancer Res. 15:1387-93 (1995)), a maleimidobenzoyl linker (Lau et al. Bioorg-Med-Chem. 3(10):1299-1304 (1995), or a 3′-N-amide analog (Lau et al. Bioorg-Med-Chem. 3(10):1305-12 (1995)).

[0142] In some embodiments, the linker is not substantially sensitive to the extracellular environment. As used herein, “not substantially sensitive to the extracellular environment,” in the context of a linker, means that no more than about 20%, typically no more than about 15%, more typically no more than about 10%, and even more typically no more than about 5%, no more than about 3%, or no more than about 1% of the linkers, in a sample of a binding protein-drug conjugate, are cleaved when the binding protein-drug conjugate is present in an extracellular environment (e.g., in plasma). Whether a linker is not substantially sensitive to the extracellular environment can be determined, for example, by incubating independently with plasma both (a) the binding protein-drug conjugate (the “conjugate sample”) and (b) an equal molar amount of unconjugated binding protein or drug (the “control sample”) for a predetermined time period (e.g., 2, 4, 8, 16, or 24 hours) and then comparing the amount of unconjugated binding protein or drug present in the conjugate sample with that present in control sample, as measured, for example, by high performance liquid chromatography.

[0143] In other, non-mutually exclusive embodiments, the linker promotes cellular internalization. In certain embodiments, the linker promotes cellular internalization when conjugated to the drug (i.e., in the milieu of the linker-drug moiety of the binding protein-drug conjugate described herein). In yet other embodiments, the linker promotes cellular internalization when conjugated to both the drug and the binding protein.

[0144] A variety of linkers that can be used with the present compositions and methods are described in WO 2004010957.

[0145] In some embodiments, the binding protein-drug conjugates described herein are used therapeutically in the treatment of a disorder (e.g., cancer or inflammation). In certain embodiments, it is desirable to only target a binding protein-drug conjugate to a cell that expresses the target to which the binding protein binds (e.g., to only target a MMP-12 expressing cell to which a MMP-12 binding protein binds, and not target a nearby “bystander” cell), e.g., to minimize toxicity. In other embodiments, it is desirable to target a binding protein-drug conjugate to a cell expressing the target to which the binding protein binds and also to bystander cells (e.g., to elicit a “bystander effect”). In some embodiments, a binding protein-drug conjugate (e.g., a MMP-12 binding protein-drug conjugate can be engineered to exert a precise killing of only antigen-presenting cells without damaging proximal antigen-negative tissues, e.g., by preparing thioether-linked conjugates. Alternatively, it can be engineered to produce a bystander effect, e.g., by preparing disulfide-linked conjugates.

[0146] For example, many solid tumors express targets (e.g., antigens) in a heterogeneous fashion and are populated with both target-positive and target-negative cells. The bystander cytotoxicity associated with disulfide linker-containing conjugates provides a rationale for treatment of sites of a disorder (e.g., tumors) with binding protein-drug conjugates even if the sites exhibit heterogeneous target expression. The bystander effect adds a degree of nonselective killing activity. Potentially, this could be a drawback if normal cells in tissues surrounding the site of disorder (e.g., tumor) are affected. However, as a potential advantage, the bystander cytotoxicity may damage tissues intricately involved in supporting the disorder, such as endothelial cells and pericytes of tumor neovasculature, or tumor stromal cells, resulting, for example, in enhanced antitumor activity of the binding protein-drug conjugate against tumors expressing the antigen either homogeneously or heterogeneously. See also Kovtum et al. Cancer Res. 66:3214 (2006).

[0147] Techniques for conjugating therapeutic agents to proteins (such as binding proteins, e.g., MMP-12 binding proteins) are known. See, e.g., Amon et al., “Monoclonal Antibodies For Immunotargeting Of Drugs In Cancer Therapy,” in Monoclonal Antibodies And Cancer Therapy (Reisfeld et al eds., Alan R. Liss, Inc., 1985); Hellstrom et al., “Antibodies For Drug Delivery,” in Controlled Drug Delivery (Robinson et al. eds., Marcel Deiker, Inc., 2nd ed. 1987); Thorpe, “Antibody Carriers Of Cytotoxic Agents In Cancer Therapy: A Review,” in Monoclonal Antibodies '84: Biological And Clinical Applications (Pinchera et al. eds., 1985); “Analysis, Results, and Future Prospective of the Therapeutic Use of Radiolabeled Antibody In Cancer Therapy,” in Monoclonal Antibodies For Cancer Detection And Therapy (Baldwin et al. eds., Academic Press, 1985); and Thorpe et al. Immunol. Rev. 62:119-58 (1982). See also, e.g., US 2006-0233794 and PCT publication WO 89/12624.

### Display Libraries

[0148] A display library is a collection of entities; each entity includes an accessible polypeptide component and a recoverable component that encodes or identifies the polypeptide component. The polypeptide component is varied so that different amino acid sequences are represented. The polypeptide component can be of any length, e.g. from three amino acids to over 300 amino acids. A display library entity can include more than one polypeptide component, for example, the two polypeptide chains of a sFab. In one exemplary implementation, a display library can be used to identify proteins that bind to MMP-12. In a selection, the polypeptide component of each member of the library is probed with MMP-12 (e.g., the catalytic domain of MMP-12 or other fragment) and if the polypeptide component binds to the MMP-12, the display library member is identified, typically by retention on a support.

[0149] Retained display library members are recovered from the support and analyzed. The analysis can include amplification and a subsequent selection under similar or dissimilar conditions. For example, positive and negative selections can be alternated. The analysis can also include determining the amino acid sequence of the polypeptide component and purification of the polypeptide component for detailed characterization.

[0150] A variety of formats can be used for display libraries. Examples include the following.

[0151] Phage Display: The protein component is typically covalently linked to a bacteriophage coat protein. The linkage results from translation of a nucleic acid encoding the protein component fused to the coat protein. The linkage can include a flexible peptide linker, a protease site, or an amino acid incorporated as a result of suppression of a stop codon. Phage display is described, for example, in U.S. Pat. No. 5,223,409; Smith (1985) Science 228:1315-1317; WO 92/18619; WO 91/17271; WO 92/20791; WO 92/15679; WO 93/01288; WO 92/01047; WO 92/09690; WO 90/02809; de Haard et al. (1999) J. Biol. Chem. 274:18218-30; Hoogenboom et al. (1998) Immunotechnology 4:1-20; Hoogenboom et al. (2000) Immunol Today 2:371-8 and Hoet et al. (2005) Nat. Biotechnol. 23(3)344-8. Bacteriophage displaying the protein component can be grown and harvested using standard phage preparatory methods, e.g. PEG precipitation from growth media. After selection of individual display phages, the nucleic acid encoding the selected protein components can be isolated from cells infected with the selected phages or from the phage themselves, after amplification. Individual colonies or plaques can be picked, the nucleic acid isolated and sequenced.

[0152] Other Display Formats. Other display formats include cell based display (see, e.g., WO 03/029456), protein-nucleic acid fusions (see, e.g., U.S. Pat. No. 6,207,446), ribosome display (See, e.g., Mattheakis et al. (1994) Proc. Natl. Acad. Sci. USA 91:9022 and Hanes et al. (2000) Nat. Biotechnol. 18:1287-92; Hanes et al. (2000) Methods Enzymol. 328:404-30; and Schaffitzel et al. (1999) J Immunol Methods. 231(1-2):119-35), and E. coli periplasmic display (J Immunol Methods. 2005 Nov. 22; PMID: 16337958).

[0153] Scaffolds. Scaffolds useful for display include: antibodies (e.g., Fab fragments, single chain Fv molecules (scFV), single domain antibodies, camelid antibodies, and camelized antibodies); T-cell receptors; MHC proteins; extracellular domains (e.g., fibronectin Type III repeats, EGF repeats); protease inhibitors (e.g., Kunitz domains, ecotin, BPTI, and so forth); TPR repeats; trifoil structures; zinc finger domains; DNA-binding proteins; particularly monomeric DNA binding proteins; RNA binding proteins; enzymes, e.g., proteases (particularly inactivated proteases), RNase; chaperones, e.g., thioredoxin and heat shock proteins; intracellular signaling domains (such as SH2 and SH3 domains); linear and constrained peptides; and linear peptide substrates. Display libraries can include synthetic and/or natural diversity. See, e.g., US 2004-0005709.

[0154] Display technology can also be used to obtain binding proteins (e.g., antibodies) that bind particular epitopes of a target. This can be done, for example, by using competing non-target molecules that lack the particular epitope or are mutated within the epitope, e.g., with alanine. Such non-target molecules can be used in a negative selection procedure as described below, as competing molecules when binding a display library to the target, or as a pre-elution agent, e.g., to capture in a wash solution dissociating display library members that are not specific to the target.

[0155] Iterative Selection. In one preferred embodiment, display library technology is used in an iterative mode. A first display library is used to identify one or more binding proteins for a target. These identified binding proteins are then varied using a mutagenesis method to form a second display library. Higher affinity binding proteins are then selected from the second library, e.g., by using higher stringency or more competitive binding and washing conditions.

[0156] In some implementations, the mutagenesis is targeted to regions at the binding interface. If, for example, the identified binding proteins are antibodies, then mutagenesis can be directed to the CDR regions of the heavy or light chains as described herein. Further, mutagenesis can be directed to framework regions near or adjacent to the CDRs. In the case of antibodies, mutagenesis can also be limited to one or a few of the CDRs, e.g., to make precise step-wise improvements. Exemplary mutagenesis techniques include: error-prone PCR, recombination, DNA shuffling, site-directed mutagenesis and cassette mutagenesis.

[0157] In one example of iterative selection, the methods described herein are used to first identify a protein from a display library that binds MMP-12 with at least a minimal binding specificity for a target or a minimal activity, e.g., an equilibrium dissociation constant for binding of less than 1 nM, 10 nM, or 100 nM. The nucleic acid sequence encoding the initial identified proteins are used as a template nucleic acid for the introduction of variations, e.g., to identify a second protein that has enhanced properties (e.g., binding affinity, kinetics, or stability) relative to the initial protein.

[0158] Off-Rate Selection. Since a slow dissociation rate can be predictive of high affinity, particularly with respect to interactions between polypeptides and their targets, the methods described herein can be used to isolate binding proteins with a desired (e.g., reduced) kinetic dissociation rate for a binding interaction to a target.

[0159] To select for slow dissociating binding proteins from a display library, the library is contacted to an immobilized target. The immobilized target is then washed with a first solution that removes non-specifically or weakly bound biomolecules. Then the bound binding proteins are eluted with a second solution that includes a saturating amount of free target or a target specific high-affinity competing monoclonal antibody, i.e., replicates of the target that are not attached to the particle. The free target binds to biomolecules that dissociate from the target. Rebinding is effectively prevented by the saturating amount of free target relative to the much lower concentration of immobilized target.

[0160] The second solution can have solution conditions that are substantially physiological or that are stringent. Typically, the solution conditions of the second solution are identical to the solution conditions of the first solution. Fractions of the second solution are collected in temporal order to distinguish early from late fractions. Later fractions include biomolecules that dissociate at a slower rate from the target than biomolecules in the early fractions.

[0161] Further, it is also possible to recover display library members that remain bound to the target even after extended incubation. These can either be dissociated using chaotropic conditions or can be amplified while attached to the target. For example, phage bound to the target can be contacted to bacterial cells.

[0162] Selecting or Screening for Specificity. The display library screening methods described herein can include a selection or screening process that discards display library members that bind to a non-target molecule. Examples of non-target molecules include streptavidin on magnetic beads, blocking agents such as bovine serum albumin, non-fat bovine milk, any capturing or target immobilizing monoclonal antibody, or non-transfected cells which do not express the human MMP-12 target.

[0163] In one implementation, a so-called “negative selection” step is used to discriminate between the target and related non-target molecule and a related, but distinct non-target molecules. The display library or a pool thereof is contacted to the non-target molecule. Members of the sample that do not bind the non-target are collected and used in subsequent selections for binding to the target molecule or even for subsequent negative selections. The negative selection step can be prior to or after selecting library members that bind to the target molecule.

[0164] In another implementation, a screening step is used. After display library members are isolated for binding to the target molecule, each isolated library member is tested for its ability to bind to a non-target molecule (e.g., a non-target listed above). For example, a high-throughput ELISA screen can be used to obtain this data. The ELISA screen can also be used to obtain quantitative data for binding of each library member to the target as well as for cross species reactivity to related targets or subunits of the target (e.g., mouse MMP-12) and also under different condition such as pH6 or pH 7.5. The non-target and target binding data are compared (e.g., using a computer and software) to identify library members that specifically bind to the target.

### Other Exemplary Expression Libraries

[0165] Other types of collections of proteins (e.g., expression libraries) can be used to identify proteins with a particular property (e.g., ability to bind MMP-12 and/or ability to modulate MMP-12), including, e.g., protein arrays of antibodies (see, e.g., De Wildt et al. (2000) Nat. Biotechnol. 18:989-994), lambda gt11 libraries, two-hybrid libraries and so forth.

### Exemplary Libraries

[0166] It is possible to immunize a non-human primate and recover primate antibody genes that can be displayed on phage (see below). From such a library, one can select antibodies that bind the antigen used in immunization. See, for example, Vaccine. (2003) 22(2):257-67 or Immunogenetics. (2005) 57(10):730-8. Thus one could obtain primate antibodies that bind and inhibit MMP-9 by immunizing a chimpanzee or macaque and using a variety of means to select or screen for primate antibodies that bind and inhibit MMP-12. One can also make chimeras of primatized Fabs with human constant regions, see Curr Opin Mol Ther. (2004) 6(6):675-83. “PRIMATIZED antibodies, genetically engineered from cynomolgus macaque monkey and human components, are structurally indistinguishable from human antibodies. They may, therefore, be less likely to cause adverse reactions in humans, making them potentially suited for long-term, chronic treatment” Curr Opin Investig Drugs. (2001) 2(5):635-8.

[0167] One exemplary type of library presents a diverse pool of polypeptides, each of which includes an immunoglobulin domain, e.g., an immunoglobulin variable domain. Of interest are display libraries where the members of the library include primate or “primatized” (e.g., such as human, non-human primate or “humanized”) immunoglobin domains (e.g., immunoglobin variable domains) or chimeric primatized Fabs with human constant regions. Human or humanized immunoglobin domain libraries may be used to identify human or “humanized” antibodies that, for example, recognize human antigens. Because the constant and framework regions of the antibody are human, these antibodies may avoid themselves being recognized and targeted as antigens when administered to humans. The constant regions may also be optimized to recruit effector functions of the human immune system. The in vitro display selection process surmounts the inability of a normal human immune system to generate antibodies against self-antigens.

[0168] A typical antibody display library displays a polypeptide that includes a VH domain and a VL domain. An “immunoglobulin domain” refers to a domain from the variable or constant domain of immunoglobulin molecules. Immunoglobulin domains typically contain two β-sheets formed of about seven β-strands, and a conserved disulphide bond (see, e.g., A. F. Williams and A. N. Barclay, 1988, Ann. Rev. Immunol. 6:381-405). The display library can display the antibody as a Fab fragment (e.g., using two polypeptide chains) or a single chain Fv (e.g., using a single polypeptide chain). Other formats can also be used.

[0169] As in the case of the Fab and other formats, the displayed antibody can include one or more constant regions as part of a light and/or heavy chain. In one embodiment, each chain includes one constant region, e.g., as in the case of a Fab. In other embodiments, additional constant regions are displayed.

[0170] Antibody libraries can be constructed by a number of processes (see, e.g., de Haard et al., 1999, J. Biol. Chem. 274:18218-30; Hoogenboom et al., 1998, Immunotechnology 4:1-20; Hoogenboom et al., 2000, Immunol. Today 21:371-378, and Hoet et al. (2005) Nat. Biotechnol. 23(3)344-8. Further, elements of each process can be combined with those of other processes. The processes can be used such that variation is introduced into a single immunoglobulin domain (e.g., VH or VL) or into multiple immunoglobulin domains (e.g., VH and VL). The variation can be introduced into an immunoglobulin variable domain, e.g., in the region of one or more of CDR1, CDR2, CDR3, FR1, FR2, FR3, and FR4, referring to such regions of either and both of heavy and light chain variable domains. The variation(s) may be introduced into all three CDRs of a given variable domain, or into CDR1 and CDR2, e.g., of a heavy chain variable domain. Any combination is feasible. In one process, antibody libraries are constructed by inserting diverse oligonucleotides that encode CDRs into the corresponding regions of the nucleic acid. The oligonucleotides can be synthesized using monomeric nucleotides or trinucleotides. For example, Knappik et al., 2000, J. Mol. Biol. 296:57-86 describe a method for constructing CDR encoding oligonucleotides using trinucleotide synthesis and a template with engineered restriction sites for accepting the oligonucleotides.

[0171] In another process, an animal, e.g., a rodent, is immunized with MMP-12. The animal is optionally boosted with the antigen to further stimulate the response. Then spleen cells are isolated from the animal, and nucleic acid encoding VH and/or VL domains is amplified and cloned for expression in the display library.

[0172] In yet another process, antibody libraries are constructed from nucleic acid amplified from naïve germline immunoglobulin genes. The amplified nucleic acid includes nucleic acid encoding the VH and/or VL domain. Sources of immunoglobulin-encoding nucleic acids are described below. Amplification can include PCR, e.g., with primers that anneal to the conserved constant region, or another amplification method.

[0173] Nucleic acid encoding immunoglobulin domains can be obtained from the immune cells of, e.g., a primate (e.g., a human), mouse, rabbit, camel, or rodent. In one example, the cells are selected for a particular property. B cells at various stages of maturity can be selected. In another example, the B cells are naïve.

[0174] In one embodiment, fluorescent-activated cell sorting (FACS) is used to sort B cells that express surface-bound IgM, IgD, or IgG molecules. Further, B cells expressing different isotypes of IgG can be isolated. In another preferred embodiment, the B or T cell is cultured in vitro. The cells can be stimulated in vitro, e.g., by culturing with feeder cells or by adding mitogens or other modulatory reagents, such as antibodies to CD40, CD40 ligand or CD20, phorbol myristate acetate, bacterial lipopolysaccharide, concanavalin A, phytohemagglutinin, or pokeweed mitogen.

[0175] In another embodiment, the cells are isolated from a subject that has a disease of condition described herein, e.g., a cancer (e.g., metastatic cancer, e.g., metastatic breast cancer), an inflammatory disease (e.g., synovitis, atherosclerosis), rheumatoid arthritis, osteoarthritis, an ocular condition (e.g., macular degeneration), diabetes, Alzheimer's Disease, cerebral ischemia, endometriosis, fibrin-invasive activity, angiogenesis, or capillary tube formation In another embodiment, the cells are isolated from a transgenic non-human animal that includes a human immunoglobulin locus.

[0176] In one preferred embodiment, the cells have activated a program of somatic hypermutation. Cells can be stimulated to undergo somatic mutagenesis of immunoglobulin genes, for example, by treatment with anti-immunoglobulin, anti-CD40, and anti-CD38 antibodies (see, e.g., Bergthorsdottir et al., 2001, J. Immunol. 166:2228). In another embodiment, the cells are naïve.

[0177] The nucleic acid encoding an immunoglobulin variable domain can be isolated from a natural repertoire by the following exemplary method. First, RNA is isolated from the immune cell. Full length (i.e., capped) mRNAs are separated (e.g. by degrading uncapped RNAs with calf intestinal phosphatase). The cap is then removed with tobacco acid pyrophosphatase and reverse transcription is used to produce the cDNAs.

[0178] The reverse transcription of the first (antisense) strand can be done in any manner with any suitable primer. See, e.g., de Haard et al., 1999, J. Biol. Chem. 274:18218-30. The primer binding region can be constant among different immunoglobulins, e.g., in order to reverse transcribe different isotypes of immunoglobulin. The primer binding region can also be specific to a particular isotype of immunoglobulin. Typically, the primer is specific for a region that is 3′ to a sequence encoding at least one CDR. In another embodiment, poly-dT primers may be used (and may be preferred for the heavy-chain genes).

[0179] A synthetic sequence can be ligated to the 3′ end of the reverse transcribed strand. The synthetic sequence can be used as a primer binding site for binding of the forward primer during PCR amplification after reverse transcription. The use of the synthetic sequence can obviate the need to use a pool of different forward primers to fully capture the available diversity.

[0180] The variable domain-encoding gene is then amplified, e.g., using one or more rounds. If multiple rounds are used, nested primers can be used for increased fidelity. The amplified nucleic acid is then cloned into a display library vector.

### Secondary Screening Methods

[0181] After selecting candidate library members that bind to a target, each candidate library member can be further analyzed, e.g., to further characterize its binding properties for the target, e.g., MMP-12, or for binding to other protein, e.g., another metalloproteinase. Each candidate library member can be subjected to one or more secondary screening assays. The assay can be for a binding property, a catalytic property, an inhibitory property, a physiological property (e.g., cytotoxicity, renal clearance, immunogenicity), a structural property (e.g., stability, conformation, oligomerization state) or another functional property. The same assay can be used repeatedly, but with varying conditions, e.g., to determine pH, ionic, or thermal sensitivities.

[0182] As appropriate, the assays can use a display library member directly, a recombinant polypeptide produced from the nucleic acid encoding the selected polypeptide, or a synthetic peptide synthesized based on the sequence of the selected polypeptide. In the case of selected Fabs, the Fabs can be evaluated or can be modified and produced as intact IgG proteins. Exemplary assays for binding properties include the following.

[0183] ELISA. Binding proteins can be evaluated using an ELISA assay. For example, each protein is contacted to a microtitre plate whose bottom surface has been coated with the target, e.g., a limiting amount of the target. The plate is washed with buffer to remove non-specifically bound polypeptides. Then the amount of the binding protein bound to the target on the plate is determined by probing the plate with an antibody that can recognize the binding protein, e.g., a tag or constant portion of the binding protein. The antibody is linked to a detection system (e.g., an enzyme such as alkaline phosphatase or horse radish peroxidase (HRP) which produces a colorimetric product when appropriate substrates are provided).

[0184] Homogeneous Binding Assays. The ability of a binding protein described herein to bind a target can be analyzed using a homogenous assay, i.e., after all components of the assay are added, additional fluid manipulations are not required. For example, fluorescence resonance energy transfer (FRET) can be used as a homogenous assay (see, for example, Lakowicz et al., U.S. Pat. No. 5,631,169; Stavrianopoulos, et al., U.S. Pat. No. 4,868,103). A fluorophore label on the first molecule (e.g., the molecule identified in the fraction) is selected such that its emitted fluorescent energy can be absorbed by a fluorescent label on a second molecule (e.g., the target) if the second molecule is in proximity to the first molecule. The fluorescent label on the second molecule fluoresces when it absorbs to the transferred energy. Since the efficiency of energy transfer between the labels is related to the distance separating the molecules, the spatial relationship between the molecules can be assessed. In a situation in which binding occurs between the molecules, the fluorescent emission of the ‘acceptor’ molecule label in the assay should be maximal. A binding event that is configured for monitoring by FRET can be conveniently measured through standard fluorometric detection means, e.g., using a fluorimeter. By titrating the amount of the first or second binding molecule, a binding curve can be generated to estimate the equilibrium binding constant.

[0185] Another example of a homogenous assay is ALPHASCREEN™ (Packard Bioscience, Meriden Conn.). ALPHASCREEN™ uses two labeled beads. One bead generates singlet oxygen when excited by a laser. The other bead generates a light signal when singlet oxygen diffuses from the first bead and collides with it. The signal is only generated when the two beads are in proximity. One bead can be attached to the display library member, the other to the target. Signals are measured to determine the extent of binding.

[0186] Surface Plasmon Resonance (SPR). The interaction of binding protein and a target can be analyzed using SPR. SPR^{X} or Biomolecular Interaction Analysis (BIA) detects biospecific interactions in real time, without labeling any of the interactants. Changes in the mass at the binding surface (indicative of a binding event) of the BIA chip result in alterations of the refractive index of light near the surface (the optical phenomenon of surface plasmon resonance (SPR)). The changes in the refractivity generate a detectable signal, which are measured as an indication of real-time reactions between biological molecules. Methods for using SPR are described, for example, in U.S. Pat. No. 5,641,640; Raether, 1988, Surface Plasmons Springer Verlag; Sjolander and Urbaniczky, 1991, Anal. Chem. 63:2338-2345; Szabo et al., 1995, Curr. Opin. Struct. Biol. 5:699-705 and on-line resources provide by BIAcore International AB (Uppsala, Sweden). BIAcore Flexchip can be used to compare and rank interactions in real time, in terms of kinetics, affinity or specificity without the use of labels. Information from SPR can be used to provide an accurate and quantitative measure of the equilibrium dissociation constant (K_{d}), and kinetic parameters, including Kₒₙ and K_{off}, for the binding of a binding protein to a target. Such data can be used to compare different biomolecules. For example, selected proteins from an expression library can be compared to identify proteins that have high affinity for the target or that have a slow K_{off}. This information can also be used to develop structure-activity relationships (SAR). For example, the kinetic and equilibrium binding parameters of matured versions of a parent protein can be compared to the parameters of the parent protein. Variant amino acids at given positions can be identified that correlate with particular binding parameters, e.g., high affinity and slow K_{off}. This information can be combined with structural modeling (e.g., using homology modeling, energy minimization, or structure determination by x-ray crystallography or NMR). As a result, an understanding of the physical interaction between the protein and its target can be formulated and used to guide other design processes.

[0187] Cellular Assays. Binding proteins can be screened for ability to bind to cells which transiently or stably express and display the target of interest on the cell surface. For example, MMP-12 binding proteins can be fluorescently labeled and binding to MMP-12 in the presence of absence of antagonistic antibody can be detected by a change in fluorescence intensity using flow cytometry e.g., a FACS machine.

Other Exemplary Methods for Obtaining MMP-12 Binding Antibodies In addition to the use of display libraries, other methods can be used to obtain a MMP-12 binding antibody. For example, MMP-12 protein or a region thereof can be used as an antigen in a non-human animal, e.g., a rodent.

[0188] In one embodiment, the non-human animal includes at least a part of a human immunoglobulin gene. For example, it is possible to engineer mouse strains deficient in mouse antibody production with large fragments of the human Ig loci. Using the hybridoma technology, antigen-specific monoclonal antibodies (Mabs) derived from the genes with the desired specificity may be produced and selected. See, e.g., XENOMOUSE™, Green et al., 1994, Nat. Gen. 7:13-21; U.S. 2003-0070185, WO 96/34096, published Oct. 31, 1996, and PCT Application No. PCT/US96/05928, filed Apr. 29, 1996.

[0189] In another embodiment, a monoclonal antibody is obtained from the non-human animal, and then modified, e.g., humanized or deimmunized. Winter describes a CDR-grafting method that may be used to prepare the humanized antibodies (UK Patent Application GB 2188638A, filed on Mar. 26, 1987; U.S. Pat. No. 5,225,539. All of the CDRs of a particular human antibody may be replaced with at least a portion of a non-human CDR or only some of the CDRs may be replaced with non-human CDRs. It is only necessary to replace the number of CDRs required for binding of the humanized antibody to a predetermined antigen.

[0190] Humanized antibodies can be generated by replacing sequences of the Fv variable region that are not directly involved in antigen binding with equivalent sequences from human Fv variable regions. General methods for generating humanized antibodies are provided by Morrison, S. L., 1985, Science 229:1202-1207, by Oi et al., 1986, BioTechniques 4:214, and by Queen et al. U.S. Pat. Nos. 5,585,089, U.S. Pat. No. 5,693,761 and U.S. Pat. No. 5,693,762. Those methods include isolating, manipulating, and expressing the nucleic acid sequences that encode all or part of immunoglobulin Fv variable regions from at least one of a heavy or light chain. Numerous sources of such nucleic acid are available. For example, nucleic acids may be obtained from a hybridoma producing an antibody against a predetermined target, as described above. The recombinant DNA encoding the humanized antibody, or fragment thereof, can then be cloned into an appropriate expression vector.

[0191] Reducing Immunogenicity of MMP-12 Binding Proteins

[0192] Immunoglobin MMP-12 binding proteins (e.g., IgG or Fab MMP-12 binding proteins) may be modified to reduce immunogenicity. Reduced immunogenicity is desirable in MMP-12 binding proteins intended for use as therapeutics, as it reduces the chance that the subject will develop an immune response against the therapeutic molecule. Techniques useful for reducing immunogenicity of MMP-12 binding proteins include deletion/modification of potential human T cell epitopes and ‘germlining’ of sequences outside of the CDRs (e.g., framework and Fc).

[0193] An MMP-12-binding antibody may be modified by specific deletion of human T cell epitopes or “deimmunization” by the methods disclosed in WO 98/52976 and WO 00/34317. Briefly, the heavy and light chain variable regions of an antibody are analyzed for peptides that bind to MHC Class II; these peptides represent potential T-cell epitopes (as defined in WO 98/52976 and WO 00/34317). For detection of potential T-cell epitopes, a computer modeling approach termed “peptide threading” can be applied, and in addition a database of human MHC class II binding peptides can be searched for motifs present in the VH and VL sequences, as described in WO 98/52976 and WO 00/34317. These motifs bind to any of the 18 major MHC class II DR allotypes, and thus constitute potential T cell epitopes. Potential T-cell epitopes detected can be eliminated by substituting small numbers of amino acid residues in the variable regions, or preferably, by single amino acid substitutions. As far as possible conservative substitutions are made, often but not exclusively, an amino acid common at this position in human germline antibody sequences may be used. Human germline sequences are disclosed in Tomlinson, I. A. et al., 1992, J. Mol. Biol. 227:776-798; Cook, G. P. et al., 1995, Immunol. Today Vol. 16 (5): 237-242; Chothia, D. et al., 1992, J. Mol. Bio. 227:799-817. The V BASE directory provides a comprehensive directory of human immunoglobulin variable region sequences (compiled by Tomlinson, I. A. et al. MRC Centre for Protein Engineering, Cambridge, UK). After the deimmunizing changes are identified, nucleic acids encoding V_{H} and V_{L} can be constructed by mutagenesis or other synthetic methods (e.g., de novo synthesis, cassette replacement, and so forth). Mutagenized variable sequence can, optionally, be fused to a human constant region, e.g., human IgG1 or ic constant regions.

[0194] In some cases a potential T cell epitope will include residues which are known or predicted to be important for antibody function. For example, potential T cell epitopes are usually biased towards the CDRs. In addition, potential T cell epitopes can occur in framework residues important for antibody structure and binding. Changes to eliminate these potential epitopes will in some cases require more scrutiny, e.g., by making and testing chains with and without the change. Where possible, potential T cell epitopes that overlap the CDRs were eliminated by substitutions outside the CDRs. In some cases, an alteration within a CDR is the only option, and thus variants with and without this substitution should be tested. In other cases, the substitution required to remove a potential T cell epitope is at a residue position within the framework that might be critical for antibody binding. In these cases, variants with and without this substitution should be tested. Thus, in some cases several variant deimmunized heavy and light chain variable regions were designed and various heavy/light chain combinations tested in order to identify the optimal deimmunized antibody. The choice of the final deimmunized antibody can then be made by considering the binding affinity of the different variants in conjunction with the extent of deimmunization, i.e., the number of potential T cell epitopes remaining in the variable region. Deimmunization can be used to modify any antibody, e.g., an antibody that includes a non-human sequence, e.g., a synthetic antibody, a murine antibody other non-human monoclonal antibody, or an antibody isolated from a display library.

[0195] MMP-12 binding antibodies are “germlined” by reverting one or more non-germline amino acids in framework regions to corresponding germline amino acids of the antibody, so long as binding properties are substantially retained. Similar methods can also be used in the constant region, e.g., in constant immunoglobulin domains.

[0196] Antibodies that bind to MMP-12, e.g., an antibody described herein, may be modified in order to make the variable regions of the antibody more similar to one or more germline sequences. For example, an antibody can include one, two, three, or more amino acid substitutions, e.g., in a framework, CDR, or constant region, to make it more similar to a reference germline sequence. One exemplary germlining method can include identifying one or more germline sequences that are similar (e.g., most similar in a particular database) to the sequence of the isolated antibody. Mutations (at the amino acid level) are then made in the isolated antibody, either incrementally or in combination with other mutations. For example, a nucleic acid library that includes sequences encoding some or all possible germline mutations is made. The mutated antibodies are then evaluated, e.g., to identify an antibody that has one or more additional germline residues relative to the isolated antibody and that is still useful (e.g., has a functional activity). In one embodiment, as many germline residues are introduced into an isolated antibody as possible.

[0197] In one embodiment, mutagenesis is used to substitute or insert one or more germline residues into a framework and/or constant region. For example, a germline framework and/or constant region residue can be from a germline sequence that is similar (e.g., most similar) to the non-variable region being modified. After mutagenesis, activity (e.g., binding or other functional activity) of the antibody can be evaluated to determine if the germline residue or residues are tolerated (i.e., do not abrogate activity). Similar mutagenesis can be performed in the framework regions.

[0198] Selecting a germline sequence can be performed in different ways. For example, a germline sequence can be selected if it meets a predetermined criteria for selectivity or similarity, e.g., at least a certain percentage identity, e.g., at least 75, 80, 85, 90, 91, 92, 93, 94, 95, 96, 97, 98, 99, or 99.5% identity. The selection can be performed using at least 2, 3, 5, or 10 germline sequences. In the case of CDR1 and CDR2, identifying a similar germline sequence can include selecting one such sequence. In the case of CDR3, identifying a similar germline sequence can include selecting one such sequence, but may including using two germline sequences that separately contribute to the amino-terminal portion and the carboxy-terminal portion. In other implementations more than one or two germline sequences are used, e.g., to form a consensus sequence.

[0199] In one embodiment, with respect to a particular reference variable domain sequence, e.g., a sequence described herein, a related variable domain sequence has at least 30, 40, 50, 60, 70, 80, 90, 95 or 100% of the CDR amino acid positions that are not identical to residues in the reference CDR sequences, residues that are identical to residues at corresponding positions in a human germline sequence (i.e., an amino acid sequence encoded by a human germline nucleic acid).

[0200] In one embodiment, with respect to a particular reference variable domain sequence, e.g., a sequence described herein, a related variable domain sequence has at least 30, 50, 60, 70, 80, 85, 90, 91, 92, 93, 94, 95, 96, 97, 98, 99 or 100% of the FR regions identical to FR sequence from a human germline sequence, e.g., a germline sequence related to the reference variable domain sequence.

[0201] Accordingly, it is possible to isolate an antibody which has similar activity to a given antibody of interest, but is more similar to one or more germline sequences, particularly one or more human germline sequences. For example, an antibody can be at least 90, 91, 92, 93, 94, 95, 96, 97, 98, 99, or 99.5% identical to a germline sequence in a region outside the CDRs (e.g., framework regions). Further, an antibody can include at least 1, 2, 3, 4, or 5 germline residues in a CDR region, the germline residue being from a germline sequence of similar (e.g., most similar) to the variable region being modified. Germline sequences of primary interest are human germline sequences. The activity of the antibody (e.g., the binding activity as measured by K_{A}) can be within a factor or 100, 10, 5, 2, 0.5, 0.1, and 0.001 of the original antibody.

[0202] Germline sequences of human immunoglobin genes have been determined and are available from a number of sources, including the international ImMunoGeneTics Information System® (IMGT), available via the world wide web at imgt.cines.fr, and the V BASE directory (compiled by Tomlinson, I. A. et al. MRC Centre for Protein Engineering, Cambridge, UK, available via the world wide web at vbase.mrc-cpe.cam.ac.uk).

[0203] Exemplary germline reference sequences for Vₖₐₚₚₐ include: O12/O2, O18/O8, A20, A30, L14, L1, L15, L4/18a, L5/L19, L8, L23, L9, L24, L11, L12, O11/O1, A17, A1, A18, A2, A19/A3, A23, A27, A11, L2/L16, L6, L20, L25, B3, B2, A26/A10, and A14. See, e.g., Tomlinson et al., 1995, EMBO J. 14(18):4628-3.

[0204] A germline reference sequence for the HC variable domain can be based on a sequence that has particular canonical structures, e.g., 1-3 structures in the H1 and H2 hypervariable loops. The canonical structures of hypervariable loops of an immunoglobulin variable domain can be inferred from its sequence, as described in Chothia et al., 1992, J. Mol. Biol. 227:799-817; Tomlinson et al., 1992, J. Mol. Biol. 227:776-798); and Tomlinson et al., 1995, EMBO J. 14(18):4628-38. Exemplary sequences with a 1-3 structure include: DP-1, DP-8, DP-12, DP-2, DP-25, DP-15, DP-7, DP-4, DP-31, DP-32, DP-33, DP-35, DP-40, 7-2, hv3005, hv3005f3, DP-46, DP-47, DP-58, DP-49, DP-50, DP-51, DP-53, and DP-54.

### Protein Production

[0205] Standard recombinant nucleic acid methods can be used to express a protein that binds to MMP-12. Generally, a nucleic acid sequence encoding the protein is cloned into a nucleic acid expression vector. Of course, if the protein includes multiple polypeptide chains, each chain can be cloned into an expression vector, e.g., the same or different vectors, that are expressed in the same or different cells.

[0206] Antibody Production. Some antibodies, e.g., Fabs, can be produced in bacterial cells, e.g., E. coli cells. For example, if the Fab is encoded by sequences in a phage display vector that includes a suppressible stop codon between the display entity and a bacteriophage protein (or fragment thereof), the vector nucleic acid can be transferred into a bacterial cell that cannot suppress a stop codon. In this case, the Fab is not fused to the gene III protein and is secreted into the periplasm and/or media.

[0207] Antibodies can also be produced in eukaryotic cells. In one embodiment, the antibodies (e.g., scFv's) are expressed in a yeast cell such as Pichia (see, e.g., Powers et al., 2001, J. Immunol. Methods. 251:123-35), Hanseula, or Saccharomyces.

[0208] In one preferred embodiment, antibodies are produced in mammalian cells. Preferred mammalian host cells for expressing the clone antibodies or antigen-binding fragments thereof include Chinese Hamster Ovary (CHO cells) (including dhfr- CHO cells, described in Urlaub and Chasin, 1980, Proc. Natl. Acad. Sci. USA 77:4216-4220, used with a DHFR selectable marker, e.g., as described in Kaufman and Sharp, 1982, Mol. Biol. 159:601 621), lymphocytic cell lines, e.g., NS0 myeloma cells and SP2 cells, COS cells, HEK293T cells (J. Immunol. Methods (2004) 289(1-2):65-80), and a cell from a transgenic animal, e.g., a transgenic mammal. For example, the cell is a mammary epithelial cell.

[0209] In addition to the nucleic acid sequence encoding the diversified immunoglobulin domain, the recombinant expression vectors may carry additional sequences, such as sequences that regulate replication of the vector in host cells (e.g., origins of replication) and selectable marker genes. The selectable marker gene facilitates selection of host cells into which the vector has been introduced (see e.g., U.S. Pat. Nos. 4,399,216, 4,634,665 and 5,179,017). For example, typically the selectable marker gene confers resistance to drugs, such as G418, hygromycin or methotrexate, on a host cell into which the vector has been introduced. Preferred selectable marker genes include the dihydrofolate reductase (DHFR) gene (for use in dhfr⁻ host cells with methotrexate selection/amplification) and the neo gene (for G418 selection).

[0210] In an exemplary system for recombinant expression of an antibody, or antigen-binding portion thereof, a recombinant expression vector encoding both the antibody heavy chain and the antibody light chain is introduced into dhfr⁻ CRO cells by calcium phosphate-mediated transfection. Within the recombinant expression vector, the antibody heavy and light chain genes are each operatively linked to enhancer/promoter regulatory elements (e.g., derived from SV40, CMV, adenovirus and the like, such as a CMV enhancer/AdMLP promoter regulatory element or an SV40 enhancer/AdMLP promoter regulatory element) to drive high levels of transcription of the genes. The recombinant expression vector also carries a DHFR gene, which allows for selection of CHO cells that have been transfected with the vector using methotrexate selection/amplification. The selected transformant host cells are cultured to allow for expression of the antibody heavy and light chains and intact antibody is recovered from the culture medium.

[0211] Standard molecular biology techniques are used to prepare the recombinant expression vector, transfect the host cells, select for transformants, culture the host cells and recover the antibody from the culture medium. For example, some antibodies can be isolated by affinity chromatography with a Protein A or Protein G coupled matrix.

[0212] For antibodies that include an Fc domain, the antibody production system may produce antibodies in which the Fc region is glycosylated. For example, the Fc domain of IgG molecules is glycosylated at asparagine 297 in the CH2 domain. This asparagine is the site for modification with biantennary-type oligosaccharides. It has been demonstrated that this glycosylation is required for effector functions mediated by Fcg receptors and complement Clq (Burton and Woof, 1992,Adv. Immunol. 51:1-84; Jefferis et al., 1998, Immunol. Rev. 163:59-76). In one embodiment, the Fc domain is produced in a mammalian expression system that appropriately glycosylates the residue corresponding to asparagine 297. The Fc domain can also include other eukaryotic post-translational modifications.

[0213] Antibodies can also be produced by a transgenic animal. For example, U.S. Pat. No. 5,849,992 describes a method of expressing an antibody in the mammary gland of a transgenic mammal. A transgene is constructed that includes a milk-specific promoter and nucleic acids encoding the antibody of interest and a signal sequence for secretion. The milk produced by females of such transgenic mammals includes, secreted-therein, the antibody of interest. The antibody can be purified from the milk, or for some applications, used directly.

### Characterization of MMP-12 Binding Proteins

[0214] Binding of MMP-12 binding proteins to cells expressing MMP-12 can be characterized in a number assays known in the art, including FACS (Fluorescence Activated Cell Sorting), ELISA, immunofluorescence, and immunocytochemistry. MMP-12 binding protein is contacted with cells and/or tissues which express or contain MMP-12, and binding is detected in accordance with the method being used. For example, a fluorescent detection system (e.g., fluorescent-labeled secondary antibody) employed for FACS and immunofluorescence analysis, or a enzymatic system is used for immunocytochemistry are generally used in these assays can be performed on non-perm. MMP-12 binding proteins can be characterized as to cellular binding by FACS (Fluorescence Activated Cell Sorting) using cells expressing MMP-12. Individual cells held in a thin stream of fluid are passed through one or more laser beams cause light to scatter and fluorescent dyes to emit light at various frequencies. Photomultiplier tubes (PMT) convert light to electrical signals and cell data is collected. Forward and side scatter are used for preliminary identification of cells. Forward and side scatter are used to exclude debris and dead cells. Fluorescent labeling allows investigation of cell structure and function. Cell autofluorescence is generated by labeling cell structures with fluorescent dyes. FACS collects fluorescence signals in one to several channels corresponding to different laser excitation and fluorescence emission wavelength. Immunofluorescence, the most widely used application, involves the staining of cells with antibodies conjugated to fluorescent dyes such as fluorescein and phycoerythrin (PE). This method can be used to label MMP-12 on permeabilized cells, e.g., using biotinylated MMP-12 binding proteins. Biotin is used in this two-step detection systems in concert with conjugated steptavidin. Biotin is typically conjugated to proteins via primary amines (i.e., lysines). Usually, between 1.5 and 3 biotin molecules are conjugated to each antibody. A second fluorescently conjugated antibody (streptavidin/PE) is added which is specific for biotin.

[0215] MMP-12 binding proteins can be characterized in cultured cells expressing the MMP-12 antigen. The method generally used is immunocytochemistry. Immunocytochemistry involves the use of antibodies that recognize parts of the protein that are exposed to the outside environment when expressed at the cell surface (the ‘primary antibody’) or that are accessible upon permeabilization of the cell. If the experiment is carried out in intact cells, such an antibody will only bind to surface expressed receptors. Biotinylated or non-biotinylated MMP-12 binding proteins can be used. The secondary antibody is then either a streptavidin/HRP antibody (for biotinylated MMP-12 binding protein) or an anti-human IgG/HRP (for non-biotinylated MMP-12 binding protein). The staining can then be detected using an inverted microscope. The assay can be performed in the absence of MMP-12 binding protein and in presence of 10 μg/mL of MMP-12 binding protein. Secreted MMP12 can be detected in samples of the medium in which MMP-12-expressing cells are cultured. For example, antibody based screening methods, e.g., using binding proteins described herein, can be used to detect secreted MMP-12. For example, immunoblot analysis or ELISA can be used.

[0216] MMP-12 binding proteins can be characterized in assays that measure their modulatory activity toward MMP-12 or fragments thereof in vitro or in vivo. For example, MMP-12 can be combined with a substrate such as Mca-Pro-Leu-Ala-Cys(Mob)-Trp-Ala-Arg-Dap(Dnp)-NH₂ under assay conditions permitting cleavage by MMP-12. The assay is performed in the absence of the MMP-12 binding protein, and in the presence of increasing concentrations of the MMP-12 binding protein. The concentration of binding protein at which 50% of the MMP-12 activity (e.g., binding to the substrate) is inhibited is the IC₅₀ value (Inhibitory Concentration 50%) or EC₅₀ (Effective Concentration 50%) value for that binding protein. Within a series or group of binding proteins, those having lower IC₅₀ or EC₅₀ values are considered more potent inhibitors of MMP-12 than those binding proteins having higher IC₅₀ or EC₅₀ values. Exemplary binding proteins have an IC₅₀ value of less than 800 nM, 400 nM, 100 nM, 25 nM, 5 nM, or 1 nM, e.g., as measured in an in vitro assay for inhibition of MMP-12 activity when the MMP-12 is at 2 μM.

[0217] MMP-12 binding proteins may also be characterized with reference to the activity of MMP-12 on substrates (e.g., lung extracellular matrix, elastin, gelatin, etc.). For example, cleavage of gelatin by MMP-12 can be detected in zymography. The method is based on a SDS gel impregnated with a substrate, which is degraded by the proteases resolved during the incubation period. Coomassie blue staining of the gels reveals proteolytic fragments as white bands on a dark blue background. Within a certain range, the band intensity can be related linearly to the amount of the protease loaded. Cells expressing MMP-12 are used in this assay. The assay is performed in the absence of the MMP-12 binding protein, and in the presence of increasing concentrations of the MMP-12 binding protein. The concentration of binding protein at which 50% of the MMP-12 activity (e.g., binding to the substrate) is inhibited is the IC₅₀ value (Inhibitory Concentration 50%) or EC₅₀ (Effective Concentration 50%) value for that binding protein. Within a series or group of binding proteins, those having lower IC₅₀ or EC₅₀ values are considered more potent inhibitors of MMP-12 than those binding proteins having higher IC₅₀ or EC₅₀ values. Exemplary binding proteins have an IC₅₀ value of less than 800 nM, 400 nM, 100 nM, 25 nM, 5 nM, or 1 nM, e.g., as measured in an in vitro assay for inhibition of MMP-12 activity.

[0218] The binding proteins can also be evaluated for selectivity toward MMP-12. For example, a MMP-12 binding protein can be assayed for its potency toward MMP-12 and a panel of MMPs and other enzymes, e.g., human and/or mouse enzymes, e.g., MMP-1, -2, -3, -7, -8, -9, -13, -14, -16, -17, -24, and TACE, and an IC₅₀ value or EC₅₀ value can be determined for each MMP. In one embodiment, a compound that demonstrates a low IC₅₀ value or EC₅₀ value for the MMP-12, and a higher IC₅₀ value or EC₅₀ value, e.g., at least 2-, 5-, or 10-fold higher, for another MMP within the test panel (e.g., MMP-1, -10) is considered to be selective toward MMP-12.

[0219] MMP-12 binding proteins can be evaluated for their ability to inhibit MMP-12 in a cell based assay, e.g., in situ zymography, e.g., in Colo205 cells or MCF-7 cells.

[0220] A pharmacokinetics study in rat, mice, or monkey can be performed with MMP-12 binding proteins for determining MMP-12 half-life in the serum. Likewise, the effect of the binding protein can be assessed in vivo, e.g., in an animal model for a disease, for use as a therapeutic, for example, to treat a disease or condition described herein, e.g., a cancer (e.g., metastatic cancer, e.g., metastatic colorectal, lung, or hepatocellular cancer), an inflammatory disease (e.g., chronic obstructive pulmonary disease (COPD), asthma, rhinitis (e.g., allergic rhinitis), atherosclerosis, multiple sclerosis, rheumatoid arthritis), cardiovascular disease, aneurysym, wound healing, aging and nerve damage associated with excess or inappropriate activity of MMP-12.

### Pharmaceutical Compositions

[0221] In another aspect, the disclosure provides compositions, e.g., pharmaceutically acceptable compositions or pharmaceutical compositions, which include an MMP-12-binding protein, e.g., an antibody molecule, other polypeptide or peptide identified as binding to MMP-12 described herein. The MMP-12 binding protein can be formulated together with a pharmaceutically acceptable carrier. Pharmaceutical compositions include therapeutic compositions and diagnostic compositions, e.g., compositions that include labeled MMP-12 binding proteins for in vivo imaging.

[0222] A pharmaceutically acceptable carrier includes any and all solvents, dispersion media, coatings, antibacterial and antifungal agents, isotonic and absorption delaying agents, and the like that are physiologically compatible. Preferably, the carrier is suitable for intravenous, intramuscular, subcutaneous, parenteral, spinal, or epidermal administration (e.g., by injection or infusion), although carriers suitable for inhalation and intranasal administration are also contemplated. Depending on the route of administration, the MMP-12 binding protein may be coated in a material to protect the compound from the action of acids and other natural conditions that may inactivate the compound.

[0223] A pharmaceutically acceptable salt is a salt that retains the desired biological activity of the parent compound and does not impart any undesired toxicological effects (see e.g., Berge, S. M., et al., 1977, J. Pharm. Sci. 66:1-19). Examples of such salts include acid addition salts and base addition salts. Acid addition salts include those derived from nontoxic inorganic acids, such as hydrochloric, nitric, phosphoric, sulfuric, hydrobromic, hydroiodic, phosphorous, and the like, as well as from nontoxic organic acids such as aliphatic mono- and dicarboxylic acids, phenyl-substituted alkanoic acids, hydroxy alkanoic acids, aromatic acids, aliphatic and aromatic sulfonic acids, and the like. Base addition salts include those derived from alkaline earth metals, such as sodium, potassium, magnesium, calcium, and the like, as well as from nontoxic organic amines, such as N,N′-dibenzylethylenediamine, N-methylglucamine, chloroprocaine, choline, diethanolamine, ethylenediamine, procaine, and the like.

[0224] The compositions may be in a variety of forms. These include, for example, liquid, semi-solid and solid dosage forms, such as liquid solutions (e.g., injectable and infusible solutions), dispersions or suspensions, tablets, pills, powders, liposomes and suppositories. The form can depend on the intended mode of administration and therapeutic application. Many compositions are in the form of injectable or infusible solutions, such as compositions similar to those used for administration of humans with antibodies. An exemplary mode of administration is parenteral (e.g., intravenous, subcutaneous, intraperitoneal, intramuscular). In one embodiment, the MMP-12 binding protein is administered by intravenous infusion or injection. In another preferred embodiment, the MMP-12 binding protein is administered by intramuscular or subcutaneous injection.

[0225] The phrases “parenteral administration” and “administered parenterally” as used herein means modes of administration other than enteral and topical administration, usually by injection, and includes, without limitation, intravenous, intramuscular, intraarterial, intrathecal, intracapsular, intraorbital, intracardiac, intradermal, intraperitoneal, transtracheal, subcutaneous, subcuticular, intraarticular, subcapsular, subarachnoid, intraspinal, epidural and intrasternal injection and infusion.

[0226] The composition can be formulated as a solution, microemulsion, dispersion, liposome, or other ordered structure suitable to high drug concentration. Sterile injectable solutions can be prepared by incorporating the binding protein in the required amount in an appropriate solvent with one or a combination of ingredients enumerated above, as required, followed by filtered sterilization. Generally, dispersions are prepared by incorporating the active compound into a sterile vehicle that contains a basic dispersion medium and the required other ingredients from those enumerated above. In the case of sterile powders for the preparation of sterile injectable solutions, the preferred methods of preparation are vacuum drying and freeze-drying that yields a powder of the active ingredient plus any additional desired ingredient from a previously sterile-filtered solution thereof. The proper fluidity of a solution can be maintained, for example, by the use of a coating such as lecithin, by the maintenance of the required particle size in the case of dispersion and by the use of surfactants. Prolonged absorption of injectable compositions can be brought about by including in the composition an agent that delays absorption, for example, monostearate salts and gelatin.

[0227] An MMP-12 binding protein can be administered by a variety of methods, although for many applications, the preferred route/mode of administration is intravenous injection or infusion. For example, for therapeutic applications, the MMP-12 binding protein can be administered by intravenous infusion at a rate of less than 30, 20, 10, 5, or 1 mg/min to reach a dose of about 1 to 100 mg/m² or 7 to 25 mg/m². The route and/or mode of administration will vary depending upon the desired results. In certain embodiments, the active compound may be prepared with a carrier that will protect the compound against rapid release, such as a controlled release formulation, including implants, and microencapsulated delivery systems. Biodegradable, biocompatible polymers can be used, such as ethylene vinyl acetate, polyanhydrides, polyglycolic acid, collagen, polyorthoesters, and polylactic acid. Many methods for the preparation of such formulations are available. See, e.g., Sustained and Controlled Release Drug Delivery Systems, J. R. Robinson, ed., 1978, Marcel Dekker, Inc., New York.

[0228] Pharmaceutical compositions can be administered with medical devices. For example, in one embodiment, a pharmaceutical composition disclosed herein can be administered with a device, e.g., a needleless hypodermic injection device, a pump, or implant.

[0229] In certain embodiments, an MMP-12 binding protein can be formulated to ensure proper distribution in vivo. For example, the blood-brain barrier (BBB) excludes many highly hydrophilic compounds. To ensure that the therapeutic compounds disclosed herein cross the BBB (if desired), they can be formulated, for example, in liposomes. For methods of manufacturing liposomes, see, e.g., U.S. Pat. Nos. 4,522,811; 5,374,548; and 5,399,331. The liposomes may comprise one or more moieties that are selectively transported into specific cells or organs, thus enhance targeted drug delivery (see, e.g., V. V. Ranade, 1989, J. Clin. Pharmacol. 29:685).

[0230] Dosage regimens are adjusted to provide the optimum desired response (e.g., a therapeutic response). For example, a single bolus may be administered, several divided doses may be administered over time or the dose may be proportionally reduced or increased as indicated by the exigencies of the therapeutic situation. It is especially advantageous to formulate parenteral compositions in dosage unit form for ease of administration and uniformity of dosage. Dosage unit form as used herein refers to physically discrete units suited as unitary dosages for the subjects to be treated; each unit contains a predetermined quantity of active compound calculated to produce the desired therapeutic effect in association with the required pharmaceutical carrier. The specification for the dosage unit forms can be dictated by and directly dependent on (a) the unique characteristics of the active compound and the particular therapeutic effect to be achieved, and (b) the limitations inherent in the art of compounding such an active compound for the treatment of sensitivity in individuals.

[0231] An exemplary, non-limiting range for a therapeutically or prophylactically effective amount of an antibody disclosed herein is 0.1-20 mg/kg, more preferably 1-10 mg/kg. An anti-MMP-12 antibody can be administered, e.g., by intravenous infusion, e.g., at a rate of less than 30, 20, 10, 5, or 1 mg/min to reach a dose of about 1 to 100 mg/m² or about 5 to 30 mg/m². For binding proteins smaller in molecular weight than an antibody, appropriate amounts can be proportionally less. Dosage values may vary with the type and severity of the condition to be alleviated. For a particular subject, specific dosage regimens can be adjusted over time according to the individual need and the professional judgment of the person administering or supervising the administration of the compositions.

[0232] The pharmaceutical compositions disclosed herein may include a “therapeutically effective amount” or a “prophylactically effective amount” of an MMP-12 binding protein disclosed herein. A “therapeutically effective amount” refers to an amount effective, at dosages and for periods of time necessary, to achieve the desired therapeutic result. A therapeutically effective amount of the composition may vary according to factors such as the disease state, age, sex, and weight of the individual, and the ability of the protein to elicit a desired response in the individual. A therapeutically effective amount is also one in which any toxic or detrimental effects of the composition is outweighed by the therapeutically beneficial effects.

[0233] A “therapeutically effective dosage” preferably modulates a measurable parameter, e.g., levels of circulating IgG antibodies or enzymatic activity, by a statistically significant degree or at least about 20%, more preferably by at least about 40%, even more preferably by at least about 60%, and still more preferably by at least about 80% relative to untreated subjects. The ability of a compound to modulate a measurable parameter, e.g., a disease-associated parameter, can be evaluated in an animal model system predictive of efficacy in human disorders and conditions, e.g., a cancer (e.g., metastatic cancer, e.g., metastatic colorectal, lung, or hepatocellular cancer), an inflammatory disease (e.g., chronic obstructive pulmonary disease (COPD), asthma, rhinitis (e.g., allergic rhinitis), atherosclerosis, multiple sclerosis, rheumatoid arthritis), cardiovascular disease, aneurysym, wound healing, aging and nerve damage associated with excess or inappropriate activity of MMP-12. Alternatively, this property of a composition can be evaluated by examining the ability of the compound to modulate a parameter in vitro.

[0234] A “prophylactically effective amount” refers to an amount effective, at dosages and for periods of time necessary, to achieve the desired prophylactic result. Typically, because a prophylactic dose is used in subjects prior to or at an earlier stage of disease, the prophylactically effective amount will be less than the therapeutically effective amount.

### Stabilization and Retention

[0235] In one embodiment, an MMP-12 binding protein is physically associated with a moiety that improves its stabilization and/or retention in circulation, e.g., in blood, serum, lymph, or other tissues, e.g., by at least 1.5, 2, 5, 10, or 50 fold. For example, an MMP-12 binding protein can be associated with a polymer, e.g., a substantially non-antigenic polymer, such as polyalkylene oxides or polyethylene oxides. Suitable polymers will vary substantially by weight. Polymers having molecular number average weights ranging from about 200 to about 35,000 (or about 1,000 to about 15,000, and 2,000 to about 12,500) can be used. For example, an MMP-12 binding protein can be conjugated to a water soluble polymer, e.g., hydrophilic polyvinyl polymers, e.g. polyvinylalcohol and polyvinylpyrrolidone. A non-limiting list of such polymers include polyalkylene oxide homopolymers such as polyethylene glycol (PEG) or polypropylene glycols, polyoxyethylenated polyols, copolymers thereof and block copolymers thereof, provided that the water solubility of the block copolymers is maintained.

[0236] An MMP-12 binding protein can also be associated with a carrier protein, e.g., a serum albumin, such as a human serum albumin. For example, a translational fusion can be used to associate the carrier protein with the MMP-12 binding protein.

### Kits

[0237] An MMP-12 binding protein described herein can be provided in a kit, e.g., as a component of a kit. For example, the kit includes (a) an MMP-12 binding protein, e.g., a composition that includes an MMP-12 binding protein, and, optionally (b) informational material. The informational material can be descriptive, instructional, marketing or other material that relates to the methods described herein and/or the use of an MMP-12 binding protein for the methods described herein.

[0238] The informational material of the kits is not limited in its form. In one embodiment, the informational material can include information about production of the compound, molecular weight of the compound, concentration, date of expiration, batch or production site information, and so forth. In one embodiment, the informational material relates to using the binding protein to treat, prevent, or diagnosis of disorders and conditions, e.g., a cancer (e.g., metastatic cancer, e.g., metastatic colorectal, lung, or hepatocellular cancer), an inflammatory disease (e.g., chronic obstructive pulmonary disease (COPD), asthma, rhinitis (e.g., allergic rhinitis), atherosclerosis, multiple sclerosis, rheumatoid arthritis), cardiovascular disease, aneurysym, wound healing, aging and nerve damage associated with excess or inappropriate activity of MMP-12.

[0239] In one embodiment, the informational material can include instructions to administer an MMP-12 binding protein in a suitable manner to perform the methods described herein, e.g., in a suitable dose, dosage form, or mode of administration (e.g., a dose, dosage form, or mode of administration described herein). In another embodiment, the informational material can include instructions to administer an MMP-12 binding protein to a suitable subject, e.g., a human, e.g., a human having, or at risk for, a disorder or condition described herein, e.g., a cancer (e.g., metastatic cancer, e.g., metastatic colorectal, lung, or hepatocellular cancer), an inflammatory disease (e.g., chronic obstructive pulmonary disease (COPD), asthma, rhinitis (e.g., allergic rhinitis), atherosclerosis, multiple sclerosis, rheumatoid arthritis), cardiovascular disease, aneurysym, wound healing, aging and nerve damage associated with excess or inappropriate activity of MMP-12. For example, the material can include instructions to administer an MMP-12 binding protein to a patient with a disorder or condition described herein, e.g., a cancer (e.g., metastatic cancer, e.g., metastatic colorectal, lung, or hepatocellular cancer), an inflammatory disease (e.g., chronic obstructive pulmonary disease (COPD), asthma, rhinitis (e.g., allergic rhinitis), atherosclerosis, multiple sclerosis, rheumatoid arthritis), cardiovascular disease, aneurysym, wound healing, aging and nerve damage associated with excess or inappropriate activity of MMP-12. The informational material of the kits is not limited in its form. In many cases, the informational material, e.g., instructions, is provided in print but may also be in other formats, such as computer readable material.

[0240] An MMP-12 binding protein can be provided in any form, e.g., liquid, dried or lyophilized form. It is preferred that an MMP-12 binding protein be substantially pure and/or sterile. When an MMP-12 binding protein is provided in a liquid solution, the liquid solution preferably is an aqueous solution, with a sterile aqueous solution being preferred. When an MMP-9 binding protein is provided as a dried form, reconstitution generally is by the addition of a suitable solvent. The solvent, e.g., sterile water or buffer, can optionally be provided in the kit.

[0241] The kit can include one or more containers for the composition containing an MMP-12 binding protein. In some embodiments, the kit contains separate containers, dividers or compartments for the composition and informational material. For example, the composition can be contained in a bottle, vial, or syringe, and the informational material can be contained association with the container. In other embodiments, the separate elements of the kit are contained within a single, undivided container. For example, the composition is contained in a bottle, vial or syringe that has attached thereto the informational material in the form of a label. In some embodiments, the kit includes a plurality (e.g., a pack) of individual containers, each containing one or more unit dosage forms (e.g., a dosage form described herein) of an MMP-12 binding protein. For example, the kit includes a plurality of syringes, ampules, foil packets, or blister packs, each containing a single unit dose of an MMP-12 binding protein. The containers of the kits can be air tight, waterproof (e.g., impermeable to changes in moisture or evaporation), and/or light-tight.

[0242] The kit optionally includes a device suitable for administration of the composition, e.g., a syringe, inhalant, dropper (e.g., eye dropper), swab (e.g., a cotton swab or wooden swab), or any such delivery device. In one embodiment, the device is an implantable device that dispenses metered doses of the binding protein. The disclosure also features a method of providing a kit, e.g., by combining components described herein.

### Treatments

[0243] Proteins that bind to MMP-12 and identified by the method described herein and/or detailed herein have therapeutic and prophylactic utilities, particularly in human subjects. These binding proteins are administered to a subject to treat, prevent, and/or diagnose a variety of disorders, including e.g., a cancer (e.g., metastatic cancer, e.g., metastatic colorectal, lung, or hepatocellular cancer), an inflammatory disease (e.g., chronic obstructive pulmonary disease (COPD), asthma, rhinitis (e.g., allergic rhinitis), atherosclerosis, multiple sclerosis, rheumatoid arthritis), cardiovascular disease, aneurysym, wound healing, aging and nerve damage associated with excess or inappropriate activity of MMP-12, or even to cells in culture, e.g. in vitro or ex vivo. Treating includes administering an amount effective to alleviate, relieve, alter, remedy, ameliorate, improve or affect the disorder, the symptoms of the disorder or the predisposition toward the disorder. The treatment may also delay onset, e.g., prevent onset, or prevent deterioration of a disease or condition.

[0244] Exemplary disorders include a cancer (e.g., metastatic cancer, e.g., metastatic lung, colorectal or hepatocellular cancer), an inflammatory disease (e.g., chronic obstructive pulmonary disease (COPD), asthma, rhinitis (e.g., allergic rhinitis), atherosclerosis, multiple sclerosis, rheumatoid arthritis), cardiovascular disease, aneurysym, wound healing, aging and nerve damage associated with excess or inappropriate activity of MMP-12. Some of these disorders are discussed above. Still other disorders that can be treated using an MMP-12 binding protein include: aortic aneurysms, dermal photoaging.

[0245] As used herein, an amount of an target-binding agent effective to prevent a disorder, or a prophylactically effective amount of the binding agent refers to an amount of a target binding agent, e.g., an MMP-12 binding protein, e.g., an anti-MMP-12 antibody described herein, which is effective, upon single- or multiple-dose administration to the subject, for preventing or delaying the occurrence of the onset or recurrence of a disorder, e.g., a disorder described herein.

[0246] A binding agent described herein can be used to reduce angiogenesis in a subject, e.g., to treat a cancer (e.g., a solid tumor) or an angiogenesis-associated disorder. The method includes administering the binding to the subject, e.g., in an amount effective to modulate angiogenesis, a symptom of the disorder, or progression of the disorder. The agent (e.g., an MMP-12 binding protein, e.g., an anti-MMP-12 antibody) may be administered multiple times (e.g., at least two, three, five, or ten times) before a therapeutically effective amount is attained.

[0247] Methods of administering MMP-12 binding proteins and other agents are also described in “Pharmaceutical Compositions.” Suitable dosages of the molecules used can depend on the age and weight of the subject and the particular drug used. The binding proteins can be used as competitive agents to inhibit, reduce an undesirable interaction, e.g., between a natural or pathological agent and the MMP-12. The dose of the MMP-12 binding protein can be the amount sufficient to block 90%, 95%, 99%, or 99.9% of the activity of MMP-12 in the patient, especially at the site of disease. Depending on the disease, this may require 0.1, 1.0, 3.0, 6.0, or 10.0 mg/Kg. For an IgG having a molecular mass of 150,000 g/mole (two binding sites), these doses correspond to approximately 18 nM, 180 nM, 540 nM, 1.08 μM, and 1.8 μM of binding sites for a 5 L blood volume.

[0248] In one embodiment, the MMP-12 binding proteins are used to inhibit an activity (e.g., inhibit at least one activity of, reduce proliferation, migration, growth or viability) of a cell, e.g., a cancer cell in vivo. The binding proteins can be used by themselves or conjugated to an agent, e.g., a cytotoxic drug, cytotoxin enzyme, or radioisotope. This method includes: administering the binding protein alone or attached to an agent (e.g., a cytotoxic drug), to a subject requiring such treatment. For example, MMP-12 binding proteins that do not substantially inhibit MMP-12 may be used to deliver nanoparticles containing agents, such as toxins, to MMP-12 associated cells or tissues, e.g., tumors.

[0249] Because the MMP-12 binding proteins recognize MMP-12-expressing cells and can bind to cells that are associated with (e.g., in proximity of or intermingled with) cancer cells, e.g., cancerous lung, liver, colon, breast, ovarian, epidermal, laryngeal, and cartilage cells, and particularly metastatic cells thereof, MMP-12 binding proteins can be used to inhibit (e.g., inhibit at least one activity, reduce growth and proliferation, or kill) any such cells and inhibit carcinogenesis. Reducing MMP-12 activity near a cancer can indirectly inhibit (e.g., inhibit at least one activity, reduce growth and proliferation, or kill) the cancer cells which may be dependent on the MMP-12 activity for metastasis, activation of growth factors, and so forth.

[0250] Alternatively, the binding proteins bind to cells in the vicinity of the cancerous cells, but are sufficiently close to the cancerous cells to directly or indirectly inhibit (e.g., inhibit at least one activity, reduce growth and proliferation, or kill) the cancers cells. Thus, the MMP-12 binding proteins (e.g., modified with a toxin, e.g., a cytotoxin) can be used to selectively inhibit cells in cancerous tissue (including the cancerous cells themselves and cells associated with or invading the cancer).

[0251] The binding proteins may be used to deliver an agent (e.g., any of a variety of cytotoxic and therapeutic drugs) to cells and tissues where MMP-12 is present. Exemplary agents include a compound emitting radiation, molecules of plants, fungal, or bacterial origin, biological proteins, and mixtures thereof. The cytotoxic drugs can be intracellularly acting cytotoxic drugs, such as toxins short range radiation emitters, e.g., short range, high energy α-emitters.

[0252] To target MMP-12 expressing cells, particularly cancerous cells, a prodrug system can be used. For example, a first binding protein is conjugated with a prodrug which is activated only when in close proximity with a prodrug activator. The prodrug activator is conjugated with a second binding protein, preferably one which binds to a non competing site on the target molecule. Whether two binding proteins bind to competing or non competing binding sites can be determined by conventional competitive binding assays. Exemplary drug prodrug pairs are described in Blakely et al., (1996) Cancer Research, 56:3287 3292.

[0253] The MMP-12 binding proteins can be used directly in vivo to eliminate antigen-expressing cells via natural complement-dependent cytotoxicity (CDC) or antibody dependent cellular cytotoxicity (ADCC). The binding proteins described herein can include complement binding effector domain, such as the Fc portions from IgG1, -2, or -3 or corresponding portions of IgM which bind complement. In one embodiment, a population of target cells is ex vivo treated with a binding agent described herein and appropriate effector cells. The treatment can be supplemented by the addition of complement or serum containing complement. Further, phagocytosis of target cells coated with a binding protein described herein can be improved by binding of complement proteins. In another embodiment target, cells coated with the binding protein which includes a complement binding effector domain are lysed by complement.

[0254] Methods of administering MMP-12 binding proteins are described in “Pharmaceutical Compositions.” Suitable dosages of the molecules used will depend on the age and weight of the subject and the particular drug used. The binding proteins can be used as competitive agents to inhibit or reduce an undesirable interaction, e.g., between a natural or pathological agent and the MMP-12.

[0255] The MMP-12 binding protein can be used to deliver macro and micromolecules, e.g., a gene into the cell for gene therapy purposes into the endothelium or epithelium and target only those tissues expressing the MMP-12. The binding proteins may be used to deliver a variety of cytotoxic drugs including therapeutic drugs, a compound emitting radiation, molecules of plants, fungal, or bacterial origin, biological proteins, and mixtures thereof. The cytotoxic drugs can be intracellularly acting cytotoxic drugs, such as short range radiation emitters, including, for example, short range, high energy a emitters, as described herein.

[0256] In the case of polypeptide toxins, recombinant nucleic acid techniques can be used to construct a nucleic acid that encodes the binding protein (e.g., antibody or antigen-binding fragment thereof) and the cytotoxin (or a polypeptide component thereof) as translational fusions. The recombinant nucleic acid is then expressed, e.g., in cells and the encoded fusion polypeptide isolated.

[0257] Alternatively, the MMP-12 binding protein can be coupled to high energy radiation emitters, for example, a radioisotope, such as ¹³¹I, a γ-emitter, which, when localized at a site, results in a killing of several cell diameters. See, e.g., S.E. Order, “Analysis, Results, and Future Prospective of the Therapeutic Use of Radiolabeled Antibody in Cancer Therapy”, Monoclonal Antibodies for Cancer Detection and Therapy, R. W. Baldwin et al. (eds.), pp 303 316 (Academic Press 1985). Other suitable radioisotopes include a emitters, such as ²¹²Bi, ²¹³Bi, and ²¹¹At, and b emitters, such as ¹⁸⁶Re and ⁹⁰Y. Moreover, ¹⁷⁷Lu may also be used as both an imaging and cytotoxic agent.

[0258] Radioimmunotherapy (RIT) using antibodies labeled with ¹³¹I, ⁹⁰Y, and ¹⁷⁷Lu is under intense clinical investigation. There are significant differences in the physical characteristics of these three nuclides and as a result, the choice of radionuclide is very critical in order to deliver maximum radiation dose to a tissue of interest. The higher beta energy particles of ⁹⁰Y may be good for bulky tumors. The relatively low energy beta particles of ¹³¹I are ideal, but in vivo dehalogenation of radioiodinated molecules is a major disadvantage for internalizing antibody. In contrast, ¹⁷⁷Lu has low energy beta particle with only 0.2-0.3 mm range and delivers much lower radiation dose to bone marrow compared to ⁹⁰Y. In addition, due to longer physical half-life (compared to ⁹⁰Y), the residence times are higher. As a result, higher activities (more mCi amounts) of ¹⁷⁷Lu labeled agents can be administered with comparatively less radiation dose to marrow. There have been several clinical studies investigating the use of ¹⁷⁷Lu labeled antibodies in the treatment of various cancers. (Mulligan T et al., 1995, Clin. Canc. Res. 1: 1447-1454; Meredith R F, et al., 1996, J. Nucl. Med. 37:1491-1496; Alvarez R D, et al., 1997, Gynecol. Oncol. 65: 94-101).

### Exemplary Diseases and Conditions

[0259] The MMP-12 binding proteins described herein are useful to treat diseases or conditions in which MMP-12 is implicated, e.g., a disease or condition described herein, or to treat one or more symptoms associated therewith. In some embodiments, the MMP-12 binding protein (e.g., MMP-12 binding IgG or Fab) inhibits MMP-12 activity, e.g., catalytic activity.

[0260] Examples of such diseases and conditions include a cancer (e.g., metastatic cancer, e.g., metastatic colorectal, lung, or hepatocellular cancer), an inflammatory disease (e.g., chronic obstructive pulmonary disease (COPD), asthma, rhinitis (e.g., allergic rhinitis), atherosclerosis, multiple sclerosis, rheumatoid arthritis), cardiovascular disease, aneurysym, wound healing, aging and nerve damage associated with excess or inappropriate activity of MMP-12. A therapeutically effective amount of a MMP-12 binding protein is administered to a subject having or suspected of having a disorder in which MMP-12 is implicated, thereby treating (e.g., ameliorating or improving a symptom or feature of a disorder, slowing, stabilizing or halting disease progression) the disorder.

[0261] The MMP-12 binding protein is administered in a therapeutically effective amount. A therapeutically effective amount of an MMP-12 binding protein is the amount which is effective, upon single or multiple dose administration to a subject, in treating a subject, e.g., curing, alleviating, relieving or improving at least one symptom of a disorder in a subject to a degree beyond that expected in the absence of such treatment. A therapeutically effective amount of the composition may vary according to factors such as the disease state, age, sex, and weight of the individual, and the ability of the compound to elicit a desired response in the individual. A therapeutically effective amount is also one in which any toxic or detrimental effects of the composition are outweighed by the therapeutically beneficial effects.

[0262] A therapeutically effective amount can be administered, typically an amount of the compound which is effective, upon single or multiple dose administration to a subject, in treating a subject, e.g., curing, alleviating, relieving or improving at least one symptom of a disorder in a subject to a degree beyond that expected in the absence of such treatment. A therapeutically effective amount of the composition may vary according to factors such as the disease state, age, sex, and weight of the individual, and the ability of the compound to elicit a desired response in the individual. A therapeutically effective amount is also one in which any toxic or detrimental effects of the composition are outweighed by the therapeutically beneficial effects. A therapeutically effective dosage preferably modulates a measurable parameter, favorably, relative to untreated subjects. The ability of a compound to inhibit a measurable parameter can be evaluated in an animal model system predictive of efficacy in a human disorder.

[0263] Dosage regimens can be adjusted to provide the optimum desired response (e.g., a therapeutic response). For example, a single bolus may be administered, several divided doses may be administered over time or the dose may be proportionally reduced or increased as indicated by the exigencies of the therapeutic situation. It is especially advantageous to formulate parenteral compositions in dosage unit form for ease of administration and uniformity of dosage. Dosage unit form as used herein refers to physically discrete units suited as unitary dosages for the subjects to be treated; each unit contains a predetermined quantity of active compound calculated to produce the desired therapeutic effect in association with the required pharmaceutical carrier.

### Cancer

[0264] Matrix metalloproteases (MMPs), such as MMP-12, are believed to contribute to cancer by cleaving components of the ECM and basement membranes, thereby allowing cancer cells to penetrate and infiltrate the subjacent stromal matrix. Additionally, a number of growth-factor receptors, cell adhesion molecules, chemokines, cytokines, apoptotic ligands, and angiogenic factors are substrates of MMPs. Hence, MMP activity may cause activation of growth factors, suppression of tumor cell apoptosis, destruction of chemokine gradients developed by host immune response, or release of angiogenic factors. MMPs may facilitate tumor growth by promoting the release of cell proliferation factors such as insulin-like growth factors which are bound to specific binding proteins (IGFBPs) (Manes et al., 1997 J. Biol. Chem. 272: 25706-25712).

[0265] Collagenases, including MMP-12, have been found at elevated levels in cancers of the colon, lung, and liver. Usually, these elevated levels correlate with higher tumor grade and invasiveness.

[0266] Accordingly, the disclosure provides methods of treating (e.g., slowing, eliminating, or reversing tumor growth, preventing or reducing, either in number or size, metastases, reducing or eliminating tumor cell invasiveness, providing an increased interval to tumor progression, or increasing disease-free survival time) cancer (e.g., breast cancer, including Her2+, Her2−, ER+, ER−, Her2+/ER+, Her2+/ER−, Her2−/ER+, and Her2−/ER− breast cancer), head and neck cancer, oral cavity cancer, laryngeal cancer, chondrosarcoma, ovarian cancer, lung cancer (e.g., non-small cell lung cancer), prostate cancer, colon cancer, colorectal cancer, liver cancer (hepatcellular cancer), cervical cancer, testicular carcinoma, melanoma, brain tumors (e.g., astrocytomas, glioblastomas, gliomas)) by administering an effective amount of an MMP-12 binding protein (e.g., an anti-MMP-12 IgG or Fab). In some embodiments, the MMP-12 binding protein inhibits MMP-12 activity.

[0267] In certain embodiments, the MMP-12 binding protein is administered as a single agent treatment. In other embodiments, the MMP-12 binding protein is administered in combination with an additional anti-cancer agent.

[0268] Also provided are methods of preventing or reducing risk of developing cancer, by administering an effective amount of an MMP-12 binding protein to a subject at risk of developing cancer, thereby reducing the subject's risk of developing a cancer.

[0269] The disclosure further provides methods of modulating (e.g., reducing or preventing) angiogenesis at a tumor site by administering an effective amount of an MMP-12 binding protein, thereby reducing or preventing angiogenesis at the tumor site. The MMP-12 binding protein may be administered as a single agent therapy or in combination with additional agents.

[0270] Also provided are methods for reducing extracellular matrix (ECM) degradation by a tumor, comprising administering an effective amount of an MMP-12 binding protein to a subject, thereby reducing ECM degradation by a tumor in the subject.

[0271] The disclosed methods are useful in the prevention and treatment of solid tumors, soft tissue tumors, and metastases thereof. Solid tumors include malignancies (e.g., sarcomas, adenocarcinomas, and carcinomas) of the various organ systems, such as those of lung, breast, lymphoid, gastrointestinal (e.g., colon), and genitourinary (e.g., renal, urothelial, or testicular tumors) tracts, pharynx, prostate, and ovary. Exemplary adenocarcinomas include colorectal cancers, renal-cell carcinoma, liver cancer, non-small cell carcinoma of the lung, and cancer of the small intestine. Additional exemplary solid tumors include: fibrosarcoma, myxosarcoma, liposarcoma, chondrosarcoma, osteogenic sarcoma, chordoma, angiosarcoma, endotheliosarcoma, lymphangiosarcoma, lymphangioendotheliosarcoma, synovioma, mesothelioma, Ewing's tumor, leiomyosarcoma, rhabdomyosarcoma, gastrointestinal system carcinomas, colon carcinoma, pancreatic cancer, breast cancer, genitourinary system carcinomas, ovarian cancer, prostate cancer, squamous cell carcinoma, basal cell carcinoma, adenocarcinoma, sweat gland carcinoma, sebaceous gland carcinoma, papillary carcinoma, papillary adenocarcinomas, cystadenocarcinoma, medullary carcinoma, bronchogenic carcinoma, renal cell carcinoma, hepatoma, bile duct carcinoma, choriocarcinoma, seminoma, embryonal carcinoma, Wilms' tumor, cervical cancer, endocrine system carcinomas, testicular tumor, lung carcinoma, small cell lung carcinoma, non-small cell lung carcinoma, bladder carcinoma, epithelial carcinoma, glioma, astrocytoma, medulloblastoma, craniopharyngioma, ependymoma, pinealoma, hemangioblastoma, acoustic neuroma, oligodendroglioma, meningioma, melanoma, neuroblastoma, and retinoblastoma. Metastases of the aforementioned cancers can also be treated or prevented in accordance with the methods described herein.

[0272] Guidance for determination of a therapeutically effective amount for treatment of cancer may be obtained by reference to in vivo models of the cancer to be treated. For example, the amount of a MMP-12 binding protein that is a therapeutically effective amount in a rodent or Libechov minipig model of cancer may be used to guide the selection of a dose that is a therapeutically effective amount. A number of rodent models of human cancers are available, including nude mouse/tumor xenograft systems (e.g., melanoma xenografts; see, e.g., Trikha et al. Cancer Research 62:2824-2833 (2002)) and murine models of breast cancer or glioma (e.g., Kuperwasser et al., Cancer Research 65, 6130-6138, (2005); Bradford et al., Br J. Neurosurg. 3(2):197-210 (1989)). A melanoblastoma-bearing Libechov minipig (MeLiM) is available as an animal model of melanoma (e.g., Boisgard et al., Eur J Nucl Med Mol Imaging 30(6):826-34 (2003)).

### Rheumatoid Arthritis and Associated Conditions

[0273] Rheumatoid arthritis (RA) is an autoimmune, chronic inflammatory disease that causes joint swelling and pain and normally results in joint destruction. RA generally follows a relapsing/remitting course, with “flares” of disease activity interspersed with remissions of disease symptoms. RA is associated with a number of additional inflammatory disorders, including Sjogren's syndrome (dry eyes and mouth caused by inflammation of tear and saliva glands), pleuritis (inflammation of the pleura that causes pain upon deep breath and coughing), rheumatoid nodules (nodular sites of inflammation that develop within the lungs), pericarditis (inflammation of the pericardium that causes pain when lying down or leaning forward), Felty syndrome (splenomegaly and leucopenia observed in conjunction with RA, making the subject prone to infection), and vasculitis (an inflammation of the blood vessels which can block blood flow). MMP-12 has been implicated in rheumatoid arthritis.

[0274] Symptoms of active RA include fatigue, lack of appetite, low grade fever, muscle and joint aches, and stiffness. Muscle and joint stiffness are usually most notable in the morning and after periods of inactivity. During flares, joints frequently become red, swollen, painful, and tender, generally as a consequence of synovitis.

[0275] Treatment for rheumatoid arthritis involves a combination of medications, rest, joint strengthening exercises, and joint protection. Two classes of medications are used in treating rheumatoid arthritis: anti-inflammatory “first-line drugs,” and Disease-Modifying Antirheumatic Drugs (DMARDs).” The first-line drugs include NSAIDS (e.g., aspirin, naproxen, ibuprofen, and etodolac) and cortisone (corticosteroids). DMARDS, such as gold (e.g., gold salts, gold thioglucose, gold thiomalate, oral gold), methotrexate, sulfasalazine, D-penicillamine, azathioprine, cyclophosphamide, chlorambucil, and cyclosporine, leflunomide, etanercept, infliximab, anakinra, and adalimumab, and hydroxychloroquine, promote disease remission and prevent progressive joint destruction, but they are not anti-inflammatory agents.

[0276] Increased levels of MMP-12 have been found in subjects with arthritis (compared with normal individuals). The disclosure provides methods of treating (e.g., ameliorating, stabilizing, or eliminating one or more symptoms or ameliorating or stabilizing the subject's score on a RA scale) rheumatoid arthritis by administering a therapeutically effective amount of a MMP-12 binding protein to a subject having or suspected of having RA. Additionally provides are methods of treating RA by administering a therapeutically effective amount of a MMP-12 binding protein and at least one NSAID and/or DMARDS.

[0277] Further provided are methods of treating (e.g., ameliorating, stabilizing, or eliminating one or more symptoms) rheumatoid arthritis associated disorders (Sjogren's syndrome, pleuritis, pulmonary rheumatoid nodules, pericarditis, Felty syndrome, and vasculitis) by administering a therapeutically effective amount of an MMP-12 binding protein.

[0278] Scales useful for assessing RA and symptoms of RA include the Rheumatoid Arthritis Severity Scale (RASS; Bardwell et al., (2002) Rheumatology 41(1):38-45), SF-36 Arthritis Specific Health Index (ASHI; Ware et al., (1999) Med. Care. 37(5 Suppl):MS40-50), Arthritis Impact Measurement Scales or Arthritis Impact Measurement Scales 2 (AIMS or AIMS2; Meenan et al. (1992) Arthritis Rheum. 35(1): 1-10); the Stanford Health Assessment Questionnaire (HAQ), HAQII, or modified HAQ (see, e.g., Pincus et al. (1983) Arthritis Rheum. 26(11):1346-53).

[0279] Guidance for the determination of the dosage that delivers a therapeutically effective amount of a MMP-12 binding protein may be obtained from animal models of rheumatoid arthritis, such as collagen-induced arthritis (CIA), which is induced, typically in rodents, by immunization with autologous or heterologous type II collagen in adjuvant (Williams et al. Methods Mol. Med. 98:207-16 (2004)).

### COPD

[0280] Chronic Obstructive Pulmonary Disease (COPD), also known as chronic obstructive airway disease (COAD), is a group of diseases characterized by the pathological limitation of airflow in the airway that is not fully reversible. COPD is the umbrella term for chronic bronchitis, emphysema and a range of other lung disorders. It is most often due to tobacco smoking, but can be due to other airborne irritants such as coal dust, asbestos or solvents, as well as congenital conditions such as alpha-1-antitrypsin deficiency.

[0281] The main symptoms of COPD include dyspnea (shortness of breath) lasting for months or perhaps years, possibly accompanied by wheezing, and a persistent cough with sputum production. It is possible the sputum may contain blood (hemoptysis) and become thicker, usually due to damage of the blood vessels of the airways. Severe COPD could lead to cyanosis caused by a lack of oxygen in the blood. In extreme cases it could lead to cor pulmonale due to the extra work required by the heart to get blood to flow through the lungs.

[0282] COPD is particularly characterised by the spirometric measurement of a ratio of forced expiratory volume over 1 second (FEV₁) to forced vital capacity (FVC) being <0.7 and the FEV₁<80% of the predicted value as measured by a plethysmograph. Other signs include a rapid breathing rate (tachypnea) and a wheezing sound heard through a stethoscope. Pulmonary emphysema is NOT the same as subcutaneous emphysema, which is a collection of air under the skin that may be detected by the crepitus sounds produced on palpation.

[0283] Treatment for COPD includes inhalers that dilate the airways (bronchodilators) and sometimes theophylline. The COPD patient must stop smoking. In some cases inhaled steroids are used to suppress lung inflammation, and, in severe cases or flare-ups, intravenous or oral steroids are given. Antibiotics are used during flare-ups of symptoms as infections can worsen COPD. Chronic, low-flow oxygen, non-invasive ventilation, or intubation may be needed in some cases. Surgery to remove parts of the disease lung has been shown to be helpful for some patients with COPD. Lung rehabilitation programs may help some patients. Lung transplant is sometimes performed for severe cases. Bronchodilators that can be used include:

[0284] There are several types of bronchodilators used clinically with varying efficacy: for example, β₂ agonists, M₃ antimuscarinics, leukotriene antagonists, cromones, corticosteroids, and xanthines. These drugs relax the smooth muscles of the airway allowing for improved airflow. β₂ agonists include: Salbutamol (VENTOLIN®), Bambuterol, Clenbuterol, Fenoterol, and Formoterol, and long acting β₂ agonists (LABAs) such as Salmeterol. M₃ muscarinic antagonists (anticholinergics) include the quaternary M₃ muscarinic antagonist Ipratropium, which is widely prescribed with the β₂ agonist salbutamol, Ipratropium, and Tiotropium, which can be combined with a LABA and inhaled steroid. Cromones include Cromoglicate and Nedocromil. Leukotriene antagonists can be used and include Montelukast, Pranlukast, Zafirlukast. Xanthines include theophylline, methylxanthines, theobromine. More aggressive EMR interventions include IV H₁ antihistamines and IV dexamethasone. Phosphodiesterase-4 antagonists inlcude roflumilast and cilomilast. Corticosteroids can be used and include glucocorticoids, beclomethasone, mometasone, and fluticasone. Corticosteroids are often combined with bronchodilators in a single inhaler. Salmeterol and fluticasone can be combined (ADVAIR®). TNF antagonists include cachexin, cachectin infliximab, adalimumab and etanercept.

[0285] The disclosure provides methods of treating COPD (e.g., ameliorating symptoms or the worsening of COPD) by administering a therapeutically effective amount of a MMP-12 binding protein (e.g., an inhibitory MMP-12 binding protein, e.g., an anti-MMP-12 IgG or Fab) to a subject having or suspected of having COPD. Also provided are methods of treating COPD by administering a therapeutically effective amount of a MMP-12 binding protein with another COPD treatment (e.g., β2 agonists, M₃ antimuscarinics, leukotriene antagonists, cromones, corticosteroids, and xanthines).

[0286] Guidance regarding the efficacy and dosage an MMP-12 binding protein which will deliver a therapeutically effective amount of the protein can be obtained from an animal model of COPD, see e.g., PCT publication WO 2007/084486 and references cited therein.

### Emphysema

[0287] Emphysema is a chronic obstructive pulmonary disease (COPD), formerly termed a chronic obstructive lung disease (COLD). It is often caused by exposure to toxic chemicals or long-term exposure to tobacco smoke.

[0288] Emphysema is caused by loss of elasticity (increased compliance) of the lung tissue, from destruction of structures supporting the alveoli, and destruction of capillaries feeding the alveoli, due to the action of alpha 1 antitrypsin deficiency. Thus the small airways collapse during exhalation, although alveolar collapsibility has increased. This impedes airflow and traps air in the lungs, as with other obstructive lung diseases. Symptoms include shortness of breath on exertion and later at rest, hyperventilation, and an expanded chest.

[0289] Signs of emphysema include pursed-lipped breathing, central cyanosis and finger clubbing. The chest has increased percussion notes, particularly just above the liver, and a difficult to palpate apex beat, both due to hyperinflation. There may be decreased breath sounds and audible expiratory wheeze. In advanced disease, there are signs of fluid overload such as pitting peripheral edema. The face has a ruddy complexion if there is a secondary polycythemia. Sufferers who retain carbon dioxide have asterixis (metabolic flap) at the wrist.

[0290] Emphysema is an irreversible degenerative condition. An important measure to slow its progression is for the patient to stop smoking and avoid all exposure to cigarette smoke and lung irritants. Pulmonary rehabilitation can be very helpful to optimize the patient's quality of life and teach the patient how to actively manage his or her care. Emphysema is also treated by supporting the breathing with anticholinergics, bronchodilators, steroid medication (inhaled or oral), and supplemental oxygen as required. Treating the patient's other conditions including gastric reflux and allergies can improve lung function. Supplemental oxygen used as prescribed (usually more than 20 hours per day) is the only non-surgical treatment which has been shown to prolong life in emphysema patients. Lung volume reduction surgery (LVRS) can improve the quality of life for certain carefully selected patients. Another treatment option is lung transplant, but few patients are strong enough physically to survive the surgery.

[0291] Cigarette smoke condensate induces MMP-12 gene expression in airway-like epithelia in mice (Lavigne et al. Biochem biophys Res Commun. 2005: 330:194). COPD patients produce greater quantities of MMP-12 than controls, which may be a critical step in the pathogenesis of emphysema (Molet et al. 2005: Inflamm Res. 2005: 54(1): 31). It has been shown that inflammatory lesions in the lungs of mice contain significantly more MMP-12 in macrophages at 10, 20, and 30 days than in controls of mice exposed to cigarette for 60 days (Valenca et al. Toxicol Pathol. 2004:32(3):351).

[0292] The disclosure provides methods of treating or preventing emphysema (e.g., ameliorating symptoms or the worsening of emphysema) by administering a therapeutically effective amount of a MMP-12 binding protein (e.g., an inhibitory MMP-12 binding protein, e.g., an anti-MMP-12 IgG or Fab) to a subject having or suspected of having emphysema. Also provided are methods of treating emphysema by administering a therapeutically effective amount of a MMP-12 binding protein with another emphysema treatment (e.g., anticholinergics, bronchodilators, steroid medication, oxygen supplementation, lung volume reduction surgery or lung transplant).

[0293] Guidance regarding the efficacy and dosage an MMP-12 binding protein which will deliver a therapeutically effective amount of the protein can be obtained from animal models of emphysema, see e.g., those described in Molet et al. 2005: Inflamm Res. 2005: 54(1): 31, Valenca et al. Toxicol Pathol. 2004:32(3):351, and references cited therein.

### Asthma

[0294] Asthma is a chronic condition involving the respiratory system in which the airway occasionally constricts, becomes inflamed, and is lined with excessive amounts of mucus, often in response to one or more triggers. These episodes may be triggered by such things as exposure to an environmental stimulant (or allergen) such as cold air, warm air, moist air, exercise or exertion, or emotional stress. In children, the most common triggers are viral illnesses such as those that cause the common cold. This airway narrowing causes symptoms such as wheezing, shortness of breath, chest tightness, and coughing. The airway constriction responds to bronchodilators.

[0295] In some individuals asthma is characterized by chronic respiratory impairment. In others it is an intermittent illness marked by episodic symptoms that may result from a number of triggering events, including upper respiratory infection, stress, airborne allergens, air pollutants (such as smoke or traffic fumes), or exercise. Some or all of the following symptoms may be present in those with asthma: dyspnea, wheezing, stridor, coughing, an inability for physical exertion. Some asthmatics who have severe shortness of breath and tightening of the lungs never wheeze or have stridor and their symptoms may be confused with a COPD-type disease.

[0296] An acute exacerbation of asthma is commonly referred to as an asthma attack. The clinical hallmarks of an attack are shortness of breath (dyspnea) and either wheezing or stridor.

[0297] During an asthma episode, inflamed airways react to environmental triggers such as smoke, dust, or pollen. The airways narrow and produce excess mucus, making it difficult to breathe. In essence, asthma is the result of an immune response in the bronchial airways.

[0298] The airways of asthmatics are “hypersensitive” to certain triggers/stimuli. In response to exposure to these triggers, the bronchi (large airways) contract into spasm (an “asthma attack”).

[0299] Inflammation soon follows, leading to a further narrowing of the airways and excessive mucus production, which leads to coughing and other breathing difficulties.

[0300] The most effective treatment for asthma is identifying triggers, such as pets or aspirin, and limiting or eliminating exposure to them. Desensitization is currently the only known “cure” to the disease.

[0301] Symptomatic control of episodes of wheezing and shortness of breath is generally achieved with fast-acting bronchodilators.

[0302] Relief medication: Short-acting, selective beta₂-adrenoceptor agonists, such as salbutamol (albuterol USAN), levalbuterol, terbutaline and bitolterol, can be used. Older, less selective adrenergic agonists, such as inhaled epinephrine and ephedrine tablets, can be used. Anticholinergic medications, such as ipratropium bromide may be used.

[0303] Preventative medication: Current treatment protocols recommend prevention medications such as an inhaled corticosteroid, which helps to suppress inflammation and reduces the swelling of the lining of the airways, in anyone who has frequent (greater than twice a week) need of relievers or who has severe symptoms. If symptoms persist, additional preventive drugs are added until the asthma is controlled. With the proper use of prevention drugs, asthmatics can avoid the complications that result from overuse of relief medications. Preventive agents include: inhaled glucocorticoids (e.g., ciclesonide, beclomethasone, budesonide, flunisolide, fluticasone, mometasone, and triamcinolone), leukotriene modifiers (e.g., montelukast, zafirlukast, pranlukast, and zileuton), mast cell stabilizers (e.g., cromoglicate (cromolyn), and nedocromil), antimuscarinics/anticholinergics (e.g., ipratropium, oxitropium, and tiotropium), methylxanthines (e.g., theophylline and aminophylline), antihistamines, an IgE blocker such as omalizumab, methotrexate).

[0304] Long-acting beta₂-adrenoceptor agonists can be used and include salmeterol, formoterol, bambuterol, and sustained-release oral albuterol. Combinations of inhaled steroids and long-acting bronchodilators are becoming more widespread; the most common combination currently in use is fluticasone/salmeterol (Advair in the United States, and Seretide in the United Kingdom). Another combination is budesonide/formoterol which is commercially known as Symbicort.

[0305] Concentrations of MMP-12 are increased in asthmatic subjects as compared with normal individuals. The disclosure provides methods of treating asthma (e.g., ameliorating symptoms or the worsening of asthma) by administering a therapeutically effective amount of a MMP-12 binding protein (e.g., an inhibitory MMP-12 binding protein, e.g., an anti-MMP-12 IgG or Fab) to a subject having or suspected of having asthma. Also provided are methods of treating asthma by administering a therapeutically effective amount of a MMP-12 binding protein with another asthma treatment (e.g., glucocorticoids, leukotriene modifiers, mast cell stabilizers, antimuscarinics/anticholinergics, antihistamines, an IgE blocker, methotrexate.

[0306] Guidance regarding the efficacy and dosage an MMP-12 binding protein which will deliver a therapeutically effective amount of the protein can be obtained from an animal model of asthma, see e.g., U.S. Pat. No. 5,602,302, or European Pat. No. EP1192944 B1, and references cited therein.

### Atherosclerosis and Cardiovascular Disease

[0307] Atherosclerosis is a disease affecting arterial blood vessels. It is a chronic inflammatory response in the walls of arteries, in large part due to the accumulation of macrophage white blood cells and promoted by low density (especially small particle) lipoproteins (plasma proteins that carry cholesterol and triglycerides) without adequate removal of fats and cholesterol from the macrophages by functional high density lipoproteins (HDL). It is caused by the formation of multiple plaques within the arteries.

[0308] Atherosclerosis causes two main problems. First, the atheromatous plaques, though long compensated for by artery enlargement, eventually lead to plaque ruptures and stenosis (narrowing) of the artery and, therefore, an insufficient blood supply to the organ it feeds. If the compensating artery enlargement process is excessive, then an aneurysm results.

[0309] Commonly, soft plaque suddenly ruptures, causing the formation of a thrombus that will rapidly slow or stop blood flow, leading to death of the tissues fed by the artery. This event is called an infarction. One commonly recognized scenario is called coronary thrombosis of a coronary artery, causing myocardial infarction (a heart attack). Another common scenario is claudication from insufficient blood supply to the legs, typically due to a combination of both stenosis and aneurysmal segments narrowed with clots. Since atherosclerosis is a body-wide process, similar events also occur in the arteries to the brain, intestines, kidneys, legs, etc.

[0310] Atherosclerosis commonly becomes symptomatic when interfering with the coronary circulation supplying the heart or cerebral circulation supplying the brain, and is considered an underlying cause of strokes, heart attacks, various heart diseases including congestive heart failure, and most cardiovascular diseases, in general.

[0311] In human peripheral blood derived macrophages, MMP-12 mRNA is upregulated by several pro-atherosclerotic cytokines (Feinberg et al. J Biol. Chem. 2000: 275(33):25766). Transcript levels of MMP-12 in carotid atherosclerotic plaques correlate with histological features and clinical manisfestations (Morgan et al. Stroke. 2004: 35(6): 1310). MMP-12 mRNA was consistently demonstrated in atherosclerotic occlusive disease (AOD) tissues and may have a direct role in the pathogenesis of aortic aneurysms (Curci et al. J Clin Invest. 1998:102(11):1900). Epidemiological data and in vivo animal experiments have indicated that differentiation of macrophages into potentially plaque-forming foam cells accompanied significantly elevated levels of matrix-degrading MMP-12 (Vogel et al. Cardiovasc Toxicol. 2004:4(4):363). MMP-12 has been shown to play an important role in vascular stenosis in hypercholesterolemia in hypercholesterolemic hamsters (Matsuno et al. 2004: 44(1): 57). Deficiency in MMP-12 protected apoliprotein E-deficient mice against atherosclerotic media destruction when MMP-12 deficiency mice were crossed in the atherosclerosis-prone apoliprotein E-deficient background and fed a cholesterol-rich diet (Lutten et al. 2004: 109(11): 1408).

[0312] Smoking has been shown to be associated with increased macrophage immunoreactivity as well as elevated expression of MMP-12, which is a marker of inflammation and tissue destruction atherosclerotic plaques (Kangavari et al. J Cardiovasc Pharmacol Ther. 2004: 9(4):291). MMP-12 was detected in the lungs of rats treated with intraperitoneal nicotine and might play an important role in the development of cardiovascular and lung diseases in smokers (Valenca et al. Exp Toxicol Pathol. 2004: 55(5)393).

[0313] Treatment for atherosclerosis includes statins, primary and secondary prevention, diet and dietary supplements, surgical intervention and prophylaxis.

[0314] Some statins, e.g., rosuvastatin, have demonstrated regression of atherosclerotic plaque within the coronary arteries by IVUS (intravascular ultrasound evaluation). Combinations of statins, niacin, intestinal cholesterol absorption-inhibiting supplements (ezetimibe and others, and to a much lesser extent fibrates) have been a successful in changing common but sub-optimal lipoprotein patterns and group outcomes.

[0315] In addition, several classes of lipoprotein expression altering agents have consistently reduced not only heart attack, stroke and hospitalization but also mortality rates. Vitamin B3, AKA niacin, in pharmacologic doses, (generally 1,000 to 3,000 mg/day) tend to improve (a) HDL levels, size and function; (b) shift LDL particle distribution to larger particle size; and (c) lower lipoprotein (a), an atheroslerosis promoting genetic variant of LDL. The described MMP-12 binding proteins can be administered in combination with one or more of these treatments.

[0316] Other treatments include minimally invasive angioplasty procedures that can include stents to physically expand narrowed arteries, and major invasive surgery, such as bypass surgery, to create additional blood supply connections that go around the more severely narrowed areas.

[0317] Patients at risk for atherosclerosis-related diseases are increasingly being treated prophylactically with low-dose aspirin and a statin.

[0318] The disclosure provides methods of treating or preventing atherosclerosis and cardiovascular disease (e.g., ameliorating symptoms or the worsening of atherosclerosis and cardiovascular disease) by administering a therapeutically effective amount of a MMP-12 binding protein (e.g., an inhibitory MMP-12 binding protein, e.g., an anti-MMP-12 IgG or Fab) to a subject having or suspected of having atherosclerosis and cardiovascular disease. Also provided are methods of treating atherosclerosis and cardiovascular disease by administering a therapeutically effective amount of a MMP-12 binding protein with another atherosclerosis and cardiovascular disease treatment (e.g., statins, primary and secondary prevention, diet and dietary supplements, surgical intervention or prophylaxis)

[0319] Guidance regarding the efficacy and dosage an MMP-12 binding protein which will deliver a therapeutically effective amount of the protein can be obtained from animal models of atherosclerosis, see e.g., those described in Fan et al. Transgenic Res. 2004: 13(3): 261) and references cited therein.

### Multiple Sclerosis

[0320] Multiple sclerosis (MS) is an autoimmune condition in which the immune system attacks the central nervous system (CNS), leading to demyelination. It may cause numerous physical and mental symptoms, and often progresses to physical and cognitive disability. Disease onset usually occurs in young adults, is more common in women.

[0321] MS presents with a variety of symptoms, including changes in sensation (hypoesthesia); muscle weakness, abnormal muscle spasms, or difficulty in moving; difficulties with coordination and balance (ataxia); problems in speech (dysarthria) or swallowing (dysphagia); visual problems (nystagmus, optic neuritis, or diplopia); fatigue and acute or chronic pain syndromes; and bladder and bowel difficulties. Cognitive impairment of varying degrees, or emotional symptomatology in the form of depression or pseudobulbar affect are also common. Neuropathic pain is usual, and this can be in the form of Lhermitte's sign. Paraesthesias can be present and include pins and needles; tingling; shivering; burning pains; feelings of pressure; and areas of skin with heightened sensitivity to touch. The pains associated with these can be aching, throbbing, stabbing, shooting, gnawing, tingling, tightness and numbness. The main clinical measure of disability progression and severity of the symptoms is the Expanded Disability Status Scale or EDSS.

[0322] The initial attacks (also known as exacerbations or relapses) are often transient, mild (or asymptomatic), and self-limited. The common initial symptoms reported are: changes in sensation in the arms, legs or face (33%), complete or partial vision loss (optic neuritis) (16%), weakness (13%), double vision (7%), unsteadiness when walking (5%), and balance problems (3%); but many rare initial symptoms have been reported such as aphasia or psychosis. Optic neuritis or focal leg weakness may lead to falls and other serious accidents.

[0323] Several therapies have proven helpful for treatment of multiple sclerosis. The aims of treatment include returning function after an attack, preventing new attacks, and preventing disability. During symptomatic attacks administration of high doses of intravenous corticosteroids, such as methylprednisolone, is the routine therapy for acute relapses. Disease-modifying treatments including interferons (e.g., AVONEX®, REBIF®, BETAFERON®), glatiramer acetate (e.g., COPAXONE®), immunosuppressant (e.g., mitoxantrone) and natalizumab (e.g., TYSABRI®) are used for relapsing-remitting MS.

[0324] In human active demyelinating lesions, phagocytic macrophages are MMP-12 positive, suggesting a role for MMP-12 during demyelination in MS (Vos et al. J Neuroimmunol 2003: 138(1-2): 106).

[0325] The disclosure provides methods of treating or preventing MS (e.g., ameliorating symptoms or the worsening of MS) by administering a therapeutically effective amount of a MMP-12 binding protein (e.g., an inhibitory MMP-12 binding protein, e.g., an anti-MMP-12 IgG or Fab) to a subject having or suspected of having MS. Also provided are methods of treating MS by administering a therapeutically effective amount of a MMP-12 binding protein with another MS treatment (e.g., interferons (e.g., AVONEX®, REBWF®, BETAFERON®), glatiramer acetate (e.g., COPAXONE®), immunosuppressant (e.g., mitoxantrone) and natalizumab (e.g., TYSABRI®)).

[0326] Guidance regarding the efficacy and dosage an MMP-12 binding protein which will deliver a therapeutically effective amount of the protein can be obtained from animal models of MS, see e.g., those described in Toft-Hansen et al. J. Immunol. 2004: 173(8): 5209, Tsutsui et al. Neurosci 2004:24:1521, Anthony et al. J Neuroimmunol 1998: 87(1-2): 62 and references cited therein.

### Abdominal Aortic Aneurysm

[0327] Abdominal aortic aneurysm (AAA) is a localized dilatation of the abdominal aorta, that exceeds the normal diameter by more than 50%. The normal diameter of the infrarenal aorta is approximately 2 cm. It is caused by a degenerative process of the aortic wall, however the exact etiology remains unknown. It is most commonly located below the kidneys (infrarenally; 90%), other possible locations are above or at the level of the kidneys (suprarenal and pararenal). The aneurysm can extend to include one or both of the iliac arteries. An aortic aneurysm may also occur in the thorax.

[0328] An abdominal aortic aneurysm occurs more commonly in older individuals (between 65 and 75), and more often in men and smokers.

[0329] A serious complication of an abdominal aortic aneurysm is rupture, which is often a fatal event. An abdominal aortic aneurysm weakens the walls of the blood vessel, leaving it vulnerable to rupturing. The clinical manifestation of ruptured AAA can include low back, flank, abdominal or groin pain, but the bleeding usually leads to a hypovolemic shock with hypotension, tachycardia, cyanosis, and altered mental status.

[0330] Some risk factors for AAA include genetic influences, hemodynamic influences, atherosclerosis, infection, trauma, arteritis, cystic medial necrosis and connective tissue disorders (e.g. Marfan syndrome, Ehlers-Danlos syndrome).

[0331] MMP-12 zymogen levels and proteolytic activities are increased in AAAs when compared with healthy aorta, suggesting that chronic aortic wall inflammation is mediated by macrophage infiltration, which may account for the destruction of medial elastin (Annabi et al. J Vasc Surg. 2002: 35(3): 539). MMP-12 is prominently expressed by aneurysm-infiltrating macrophages within the degenerating aortic media of AAA, where it is also bound to residual elastic fiber fragments. Because elastin represents a critical component of aortic wall structure and a matrix substrate for metalloelastases, MMP-12 may have a direct role in the pathogenesis of aortic aneurysms (Curci et al. 1998: 102(11): 1900).

[0332] The treatment options for asymptomatic AAA are immediate repair, surveillance with a view to eventual repair, and conservative management. There are currently two modes of repair available for an AAA: open aneurysm repair (OR), and endovascular aneurysm repair (EVAR).

[0333] The disclosure provides methods of treating or preventing AAA (e.g., ameliorating symptoms or the worsening of AAA) by administering a therapeutically effective amount of a MMP-12 binding protein (e.g., an inhibitory MMP-12 binding protein, e.g., an anti-MMP-12 IgG or Fab) to a subject having or suspected of having AAA. Also provided are methods of treating AAA by administering a therapeutically effective amount of a MMP-12 binding protein with another AAA treatment (e.g., immediate repair, surveillance with a view to eventual repair, or conservative management).

[0334] Guidance regarding the efficacy and dosage an MMP-12 binding protein which will deliver a therapeutically effective amount of the protein can be obtained from animal models of AAA, see e.g., those described in Longo et al. Surgery. 2005: 137(4): 457, Shimizu et al. J Clin Invest. 2004: 114(2): 300 and references cited therein.

### Sclerosis

[0335] Systemic sclerosis (SSc) is the generalized type of scleroderma, which is a chronic disease characterized by excessive deposits of collagen in the skin or other organs. SSc can be fatal as a result of heart, kidney, lung or intestinal damage autoimmune disease.

[0336] Scleroderma affects the skin, and in more serious cases it can affect the blood vessels and internal organs. The more evident symptom is usually the hardening of the skin and associated scarring. Blood vessels may also be more visible. Many SSc patients (over 80%) have vascular symptoms and Raynaud's phenomenon. During an attack, there is discoloration of the hands and feet in response to cold. Raynaud's normally affects the fingers and toes. SSc and Raynaud's can cause painful ulcers on the fingers or toes which are known as digital ulcers. Calcinosis is also common in SSc, and is often seen near the elbows, knees or other joints. Diffuse scleroderma can cause musculoskeletal, pulmonary, gastrointestinal, renal and other complications. Patients with larger amounts of cutaneous involvement are more likely to have involvement of the internal tissues and organs.

[0337] There appears to be a familial predisposition for autoimmune disease.

[0338] Overproduction of MMP-12 by SSc microvascular endothelial cells (MVECs) has been shown to account for the cleavage of urokinase-type plasminogen activator receptor (uPAR) and the impairment of angiogenesis in vitro and may contribute to reduced angiogenesis in SSc patients (D'Alessio et al. Arthritis Rheum. 2004: 50(10): 3275).

[0339] Treatment for some of the symptoms of scleroderma includes drugs that soften the skin and reduce inflammation. Topical treatment for the skin changes of scleroderma do not alter the disease course, but may improve pain and ulceration. A range of NSAIDs (nonsteroidal anti-inflammatory drugs) can be used to ease painful symptoms, such as naproxen. Episodes of Raynaud's phenomenon sometimes respond to nifedipine or other calcium channel blockers; severe digital ulceration may respond to prostacyclin analogue iloprost, and the dual endothelin-receptor antagonist bosentan may be beneficial for Raynaud's phenomenon. The skin tightness may be treated systemically with methotrexate and cyclosporin. Scleroderma renal crisis, the occurrence of acute renal failure and malignant hypertension (very high blood pressure with evidence of organ damage) in people with scleroderma, is effectively treated with drugs from the class of the ACE inhibitors. Active alveolitis is often treated with pulses of cyclophosphamide, often together with a small dose of steroids. Pulmonary hypertension may be treated with epoprostenol, bosentan and possibly aerolized iloprost.

[0340] The disclosure provides methods of treating or preventing SSc (e.g., ameliorating symptoms or the worsening of SSc) by administering a therapeutically effective amount of a MMP-12 binding protein (e.g., an inhibitory MMP-12 binding protein, e.g., an anti-MMP-12 IgG or Fab) to a subject having or suspected of having SSc. Also provided are methods of treating SSc by administering a therapeutically effective amount of a MMP-12 binding protein with another SSc treatment (e.g., NSAIDs, calcium channel blockers, prostacyclin analogue, the dual endothelin-receptor antagonist, methotrexate, cyclosporin, ACE inhibitors, cyclophosphamide, epoprostenol, and bosentan).

### Nephritis

[0341] Nephritis is inflammation of the kidney and is often caused by infections, toxins, and auto-immune diseases. Subtypes include glomerulonephritis, interstitial nephritis or tubulo-interstitial nephritis, pyelonephritis and Lupus nephritis.

[0342] Nephritis is a common cause of glomerular injury. It is a disturbance of the glomerular structure with inflammatory cell proliferation. This can lead to: reduced glomerular blood flow leading to reduced urine output (oliguria) and retention of waste products (uremia). As a result, there can also be leakage of red blood cells from damaged glomerulus (hematuria). Low renal blood flow activates the renin-angiotensin-aldosterone system (RAAS), which therefore causes fluid retention and mild hypertension.

[0343] MMP-12 is one of the highly expressed genes in the kidneys on days 3 and 7 after the injection of anti-GBM (glomerular basement membrane) antiserum in a Rat crescentic glomerulonephritis model (Kaneko et al. J. Immunol. 2003: 170(6): 3373).

[0344] As a subset of nephritis, e.g. pyelonephritis, are often due to bacterial infections, antibiotics are the mainstay of treatment.

[0345] The disclosure provides methods of treating or preventing nephritis (e.g., ameliorating symptoms or the worsening of nephritis) by administering a therapeutically effective amount of a MMP-12 binding protein (e.g., an inhibitory MMP-12 binding protein, e.g., an anti-MMP-12 IgG or Fab) to a subject having or suspected of having nephritis. Also provided are methods of treating nephritis by administering a therapeutically effective amount of a MMP-12 binding protein with another nephritis treatment (e.g. antibiotics).

[0346] Guidance regarding the efficacy and dosage an MMP-12 binding protein which will deliver a therapeutically effective amount of the protein can be obtained from animal models of nephritis, see e.g., those described in Kaneko et al. J. Immunol. 2003: 170(6): 3373, and references cited therein.

### Wound Healing

[0347] Wound healing, or wound repair, is the process of regenerating dermal and epidermal tissue. When an individual is wounded, a set of complex biochemical events takes place in a closely orchestrated cascade to repair the damage. These events overlap in time and may be artificially categorized into separate steps: the inflammatory, proliferative, and remodeling phases.

[0348] By regulating the proliferation of corneal epithelial cells, MMP-12 appears to contribute to corneal wound healing (Lyu et al. J Biol. Chem. 2005: 280(22): 21653). Epithelial expression of MMP-12 in chronic wounds provides a diagnostic clue for distinguishing squamous cell carcinoma (SCCs) from nonmalignant wounds (Impola et al. Br J. Dermatol. 2005: 152(4): 720).

[0349] The disclosure provides methods of treating wound (e.g., ameliorating symptoms or the worsening of wound) by administering a therapeutically effective amount of a MMP-12 binding protein (e.g., an inhibitory MMP-12 binding protein, e.g., an anti-MMP-12 IgG or Fab) to a subject having or suspected of having wound. Also provided are methods of treating wound by administering a therapeutically effective amount of a MMP-12 binding protein with another wound treatment.

### Encephalomyelitis and Neuroinflammatory Disorders

[0350] Encephalomyelitis, e.g., experimental autoimmune encephalomyelitis, sometimes Experimental Allergic Encephalomyelitis (EAE), is an animal model of brain inflammation. It is an inflammatory demyelinating disease of the central nervous system (CNS). It is often used with rodents and is widely studied as an animal model of the human CNS demyelinating diseases, including the diseases multiple sclerosis and acute disseminated encephalomyelitis. EAE can be induced by inoculation with whole CNS tissue, purified myelin basic protein (MBP) or myelin proteolipid protein (PLP), together with adjuvants. It may also be induced by the passive transfer of T cells specifically reactive to these myelin antigens. EAE may have either an acute or a chronic relapsing course. Acute EAE closely resembles the human disease acute disseminated encephalomyelitis, while chronic relapsing EAE resembles multiple sclerosis. EAE is also the prototype for T-cell-mediated autoimmune disease in general.

[0351] MMP-12 is overexpressed in spinal cord from SJL/J mice and mice with adoptively transferred myelin basic protein (MBP)-specific EAE (Toft-Hansen et al. J. Immunol. 2004: 173(8): 5209). In human, aberrant expression of MMP-12 has been implicated in the pathogenesis of immune-mediated neuroinflammatory disorders (Hughes et al. Neuroscience. 2002: 113(2):273).

[0352] The disclosure provides methods of treating or preventing encephalomyelitis, e.g., EAE, and neuroinflammatory disorders (e.g., ameliorating symptoms or the worsening of encephalomyelitis and neuroinflammatory disorders) by administering a therapeutically effective amount of a MMP-12 binding protein (e.g., an inhibitory MMP-12 binding protein, e.g., an anti-MMP-12 IgG or Fab) to a subject having or suspected of having EAE and neuroinflammatory disorders. Also provided are methods of treating encephalomyelitis and neuroinflammatory disorders by administering a therapeutically effective amount of a MMP-12 binding protein with another nephritis treatment.

[0353] Guidance regarding the efficacy and dosage an MMP-12 binding protein which will deliver a therapeutically effective amount of the protein can be obtained from animal models of encephalomyelitis and neuroinflammatory disorders, see e.g., those described in Toft-Hansen et al. J. Immunol. 2004: 173(8): 5209, and references cited therein.

### Aging

[0354] In biology, senescence is the state or process of aging. Cellular senescence is a phenomenon where isolated cells demonstrate a limited ability to divide in culture, while organismal senescence is the aging of organisms.

[0355] Organismal senescence is characterized by the declining ability to respond to stress, increasing homeostatic imbalance and increased risk of disease. As genes that have an effect on aging are discovered, aging is increasingly being regarded in a similar fashion to other genetic conditions.

[0356] In humans and other animals, cellular senescence has been attributed to the shortening of telomeres with each cell cycle; when telomeres become too short, the cells die. Other genes are known to affect the aging process, the sirtuin family of genes have been shown to have a significant effect on the lifespan of yeast and nematodes. Over-expression of the RAS2 gene increases lifespan in yeast substantially. In addition to genetic ties to lifespan, diet has been shown to substantially affect lifespan in many animals.

[0357] The level of MMP-12 increases in the insoluble fraction of old mice, suggesting increased extracellular matrix (ECM) degradative capacity and MMP-12 may contribute to age-dependent ECM remodeling (Lindsey et al. Cardiovasc Res. 2005: 66(2):410.) Heat treatment increases MMP-12 mRNA and protein expression in human skin suggesting that MMP-12 may contribute to skin aging by accumulation of elastotic material in photoaged skin (Chen et al. J Invest Dermatol. 2005: 124(1):70). MMP-12 may also contribute to skin aging by remodeling of elastotic areas in sun-damaged skin (Saarialho-Kere et al. J Invest Dermatol. 1999: 113(4):664).

[0358] The disclosure provides methods of treating or preventing aging (e.g., ameliorating symptoms or the worsening of aging e.g. skin aging) by administering a therapeutically effective amount of a MMP-12 binding protein (e.g., an inhibitory MMP-12 binding protein, e.g., an anti-MMP-12 IgG or Fab) to a subject having or suspected of having aging (e.g. skin aging). Also provided are methods of treating aging by administering a therapeutically effective amount of a MMP-12 binding protein with another aging treatment.

### Viral Encephalitis

[0359] Viral encephalitis is an acute inflammation of the brain caused by a viral infection. Brain damage occurs as the inflamed brain pushes against the skull, and can lead to death.

[0360] Patients with encephalitis suffer from fever, headache and photophobia with weakness and seizures also common. Less commonly, stiffness of the neck can occur with rare cases of patients also suffering from stiffness of the limbs, slowness in movement and clumsiness depending on which specific part of the brain is involved. The symptoms of encephalitis are caused by the brain's defense mechanisms activating to get rid of the infection.

[0361] Treatment is usually symptomatic. Reliably tested specific antiviral agents are available only for a few viral agents (e.g. acyclovir for herpes simplex virus). In patients who are very sick, supportive treatment, such as mechanical ventilation, is also important.

[0362] Infection of the murine central nervous system (CNS) with a neurotropic coronavirus induces encephalitis associated with increased levels of mRNA encoding MMP-12 (Zhou et al. J. Virol. 2005: 79(8):4764).

[0363] The disclosure provides methods of treating or preventing viral encephalitis (e.g., ameliorating symptoms or the worsening of viral encephalitis) by administering a therapeutically effective amount of a MMP-12 binding protein (e.g., an inhibitory MMP-12 binding protein, e.g., an anti-MMP-12 IgG or Fab) to a subject having or suspected of having viral encephalitis. Also provided are methods of treating viral encephalitis by administering a therapeutically effective amount of a MMP-12 binding protein with another viral encephalitis treatment (e.g., acyclovir, mechanical ventilation).

[0364] Guidance regarding the efficacy and dosage an MMP-12 binding protein which will deliver a therapeutically effective amount of the protein can be obtained from animal models of viral encephalitis, see e.g., those described in Zhou et al. J. Virol. 2005: 79(8):4764, and references cited therein.

### Stroke

[0365] Stroke is the rapidly developing loss of brain functions due to a disturbance in the blood vessels supplying blood to the brain. This can be due to ischemia (lack of blood supply) caused by thrombosis or embolism, or due to a hemorrhage. In an ischemic stroke, blood supply to part of the brain is decreased, leading to dysfunction and necrosis of the brain tissue in that area. Intracranial hemorrhage is the accumulation of blood anywhere within the skull vault. A distinction is made between intra-axial hemorrhage (blood inside the brain) and extra-axial hemorrhage (blood inside the skull but outside the brain). Intra-axial hemorrhage is due to intraparenchymal hemorrhage or intraventricular hemorrhage (blood in the ventricular system). The main types of extra-axial hemorrhage are epidural hematoma (bleeding between the dura mater and the skull), subdural hematoma (in the subdural space) and subarachnoid hemorrhage (between the arachnoid mater and pia mater). Most of the hemorrhagic stroke syndromes have specific symptoms (e.g. headache, previous head injury).

[0366] Stroke symptoms typically develop rapidly (seconds to minutes). The symptoms of a stroke are related to the anatomical location of the damage; nature and severity of the symptoms can therefore vary widely. Ischemic strokes usually only affect regional areas of the brain perfused by the blocked artery. Hemorrhagic strokes can affect local areas, but often can also cause more global symptoms due to bleeding and increased intracranial pressure.

[0367] In mice MMP-12 expression following haemorrhagic stroke is deleterious and contributes to the development of secondary injury in this disease (Wells et al. Eur J. Neurosci. 2005: 21(1):187). Transcript level of MMP-12 in carotid atherosclerotic plaques is correlated with histological features and clinical manifestations, supporting a role of MMP-12 in determining atherosclerotic plaque stability (Morgan et al. Stroke. 2001: 32(9):2198).

[0368] Treatment for stroke includes pharmacologic thrombolysis (“clot busting”) with the drug tissue plasminogen activator, tPA, to dissolve the clot and unblock the artery. Another treatment for acute ischemic stroke is removal of the offending thrombus directly. This is accomplished by inserting a catheter into the femoral artery, directing it into the cerebral circulation, and deploying a corkscrew-like device to ensnare the clot, which is then withdrawn from the body. Anticoagulation can prevent recurrent stroke. Patients with bleeding into (intracerebral hemorrhage) or around the brain (subarachnoid hemorrhage), require neurosurgical evaluation to detect and treat the cause of the bleeding.

[0369] The disclosure provides methods of treating or preventing stroke (e.g., ameliorating symptoms or the worsening of stroke) by administering a therapeutically effective amount of a MMP-12 binding protein (e.g., an inhibitory MMP-12 binding protein, e.g., an anti-MMP-12 IgG or Fab) to a subject having or suspected of having stroke. Also provided are methods of treating stroke by administering a therapeutically effective amount of a MMP-12 binding protein with another stroke treatment (e.g., thrombolysis, plasminogen activator, anticoagulation or surgical procedures).

[0370] Guidance regarding the efficacy and dosage an MMP-12 binding protein which will deliver a therapeutically effective amount of the protein can be obtained from animal models of stroke, see e.g., those described in Wells et al. Eur J. Neurosci. 2005: 21(1):187), and references cited therein.

### Enterocolitis

[0371] Enterocolitis (or “coloenteritis”) is an inflammation of both the small and large intestine. Enteritis is the inflammation of the small intestine and colitis is inflammation of the large intestine, especially the colon.

[0372] Symptoms for enteritis may include abdominal pain, diarrhea, abdominal distension and hematochezia. General signs and symptoms of colitis include pain, tenderness in the abdomen, depression, rapid weight loss, aches and pains within the joints, fatigue, changes in bowel habits (increased frequency), fever; swelling of the colon tissue, erythema (redness) of the surface of the colon, ulcers on the colon (in ulcerative colitis) which can bleed, mucous in the stool, blood in stool and rectal bleeding. Other symptoms may include: diarrhea, gas, bloating, indigestion, heartburn, reflux, Gastro oesophageal reflux disease (GORD), cramps, urgency and many other uncomfortable aches in the gastrointestinal system.

[0373] MMP-12 is up-regulated in necrotizing enterocolitis (NEC), suggesting it might be a major factor in tissue destruction and remodeling in NEC (Bista et al. J Pediatr Gastroenterol Nutr. 2005:40(1):60).

[0374] Viral diarrhea is usually self-limiting and is treated with rehydration. When bacterial causes are suspected, antibiotics can be considered. Treatment of colitis includes administration of antibiotics and general non-steroidal anti-inflammatory (NSAIDS) medications such as Mesalamine (Asacol®) or its derivatives; Azathioprine or similar immunosupressants; steroids such as prednisolone and prednisone; drugs that ameliorate inflammation and pain (buscopan).

[0375] The disclosure provides methods of treating or preventing enterocolitis (e.g., ameliorating symptoms or the worsening of enterocolitis) by administering a therapeutically effective amount of a MMP-12 binding protein (e.g., an inhibitory MMP-12 binding protein, e.g., an anti-MMP-12 IgG or Fab) to a subject having or suspected of having enterocolitis. Also provided are methods of treating enterocolitis by administering a therapeutically effective amount of a MMP-12 binding protein with another enterocolitis treatment (e.g., rehygration, antibiotics, NSAIDS, Mesalamine (Asacol®) or its derivatives; Azathioprine or similar immunosupressants; steroids such as prednisolone and prednisone; drugs that ameliorate inflammation and pain (buscopan)).

### Celiac Disease

[0376] Coeliac disease (CD), or celiac disease, is an autoimmune disorder of the small intestine that occurs in genetically predisposed people of all ages from middle infancy.

[0377] Symptoms include chronic diarrhoea, failure to thrive (in children), and fatigue, but these may be absent and symptoms in all other organ systems have been described.

[0378] CD is caused by a reaction to gliadin, a gluten protein found in wheat (and similar proteins of the tribe Triticeae which includes other cultivars such as barley and rye). Upon exposure to gliadin, the enzyme tissue transglutaminase modifies the protein, and the immune system cross-reacts with the bowel tissue, causing an inflammatory reaction. That leads to flattening of the lining of the small intestine, which interferes with the absorption of nutrients.

[0379] The presence of a peculiar MMP pattern in active CD strongly dominated by MMP-12 correlates either with IFN-gamma or the degree of mucosal damage (Ciccocioppo et al. J Pediatr Gastroenterol Nutr. 2005: 85(3):397).

[0380] Treatment for CD is a gluten-free diet.

[0381] The disclosure provides methods of treating or preventing CD (e.g., ameliorating symptoms or the worsening of CD) by administering a therapeutically effective amount of a MMP-12 binding protein (e.g., an inhibitory MMP-12 binding protein, e.g., an anti-MMP-12 IgG or Fab) to a subject having or suspected of having CD. Also provided are methods of treating CD by administering a therapeutically effective amount of a MMP-12 binding protein with another CD treatment (e.g., gluten-free diet).

### Spinal Cord Injury

[0382] Spinal cord injury (SCI) causes myelopathy or damage to white matter or myelinated fiber tracts that carry sensation and motor signals to and from the brain. It also damages gray matter in the central part of the spinal cord, causing segmental losses of interneurons and motorneurons. Spinal cord injury can occur from many causes, including: trauma, tumor, ischemia, developmental discorders, neurodegernerative diseases, demyelinative diseases, transverse myelitis, and vascular malformations.

[0383] MMP-12 expression after spinal cord trauma is deleterious in mice and contributes to the development of secondary injury in SCI (Wells et al. J. Neurosci. 2003: 23(31): 10107).

[0384] Treatment for acute traumatic spinal cord injuries includes giving a high dose methylprednisolone if the injury occurred within 8 hours. The recommendation is primarily based on the National Acute Spinal Cord Injury Studies (NASCIS) II and III.

[0385] The disclosure provides methods of treating or preventing SCI (e.g., ameliorating symptoms or the worsening of SCI) by administering a therapeutically effective amount of a MMP-12 binding protein (e.g., an inhibitory MMP-12 binding protein, e.g., an anti-MMP-12 IgG or Fab) to a subject having or suspected of having SCI. Also provided are methods of treating SCI by administering a therapeutically effective amount of a MMP-12 binding protein with another SCI treatment (e.g., methylprednisolone).

[0386] Guidance regarding the efficacy and dosage an MMP-12 binding protein which will deliver a therapeutically effective amount of the protein can be obtained from animal models of SCI, see e.g., those described in Wells et al. J. Neurosci. 2003: 23(31): 10107), and references cited therein.

### Acute Lung Injury in Hyperoxia

[0387] Acute lung injury could be a side effect of therapy with a high concentration of inspired oxygen in patients.

[0388] Overexpression of Stat3C, a constitutive active form of STAT3, in respiratory epithelial cells of a doxycycline-controlled double-transgenic mouse system protects lung from inflammation and injury caused by hyperoxia. This protection is mediated at least partially through inhibition of hyperoxia-induced synthesis and release of MMP-12 by neutrophils and alveolar resident cells (Lian et al. J Immunol. 2005: 174(11):7250).

[0389] The disclosure provides methods of treating or preventing acute lung injury in hyperoxia (e.g., ameliorating symptoms or the worsening of acute lung injury in hyperoxia) by administering a therapeutically effective amount of a MMP-12 binding protein (e.g., an inhibitory MMP-12 binding protein, e.g., an anti-MMP-12 IgG or Fab) to a subject having or suspected of having acute lung injury in hyperoxia. Also provided are methods of treating acute lung injury in hyperoxia by administering a therapeutically effective amount of a MMP-12 binding protein with another acute lung injury in hyperoxia treatment.

[0390] Guidance regarding the efficacy and dosage an MMP-12 binding protein which will deliver a therapeutically effective amount of the protein can be obtained from animal models of acute lung injury in hyperoxia, see e.g., those described in Lian et al. J Immunol. 2005: 174(11):7250, and references cited therein.

### Pulmonary Inflammatory Diseases

[0391] Studies using animal models of acute and chronic pulmonary inflammatory diseases have given evidences that MMP-12 is an important mediator of the pathogenesis of these diseases. MMP inhibitor, marimastat could reverse some of these inflammatory events (Menan et al. Mem Inst Oswaldo Cruz. 2005: 100:167). MMP-12 also plays an important proinflammatory role in the development of allergic inflammation in a mouse model of allergic airway inflammation induced by cockroach antigen (CRA) (Warner et al. Am J. Pathol. 2004:165(6):1921).

[0392] The disclosure provides methods of treating or preventing pulmonary inflammatory diseases (e.g., ameliorating symptoms or the worsening of pulmonary inflammatory diseases) by administering a therapeutically effective amount of a MMP-12 binding protein (e.g., an inhibitory MMP-12 binding protein, e.g., an anti-MMP-12 IgG or Fab) to a subject having or suspected of having pulmonary inflammatory diseases. Also provided are methods of treating pulmonary inflammatory diseases by administering a therapeutically effective amount of a MMP-12 binding protein with another pulmonary inflammatory diseases treatment (e.g. antibiotics).

[0393] Guidance regarding the efficacy and dosage an MMP-12 binding protein which will deliver a therapeutically effective amount of the protein can be obtained from animal models of pulmonary inflammatory diseases, see e.g., those described in Warner et al. Am J. Pathol. 2004:165(6):1921, and references cited therein.

### Combination Therapies

[0394] The MMP-12 binding proteins described herein, e.g., anti-MMP-12 Fabs or IgGs, can be administered in combination with one or more of the other therapies for treating a disease or condition associated with MMP-12 activity, e.g., a disease or condition described herein. For example, an MMP-12 binding protein can be used therapeutically or prophylactically with surgery, another MMP-12 inhibitor, e.g., a small molecule inhibitor, another anti-MMP-12 Fab or IgG (e.g., another Fab or IgG described herein), peptide inhibitor, or small molecule inhibitor. Examples of MMP-12 inhibitors that can be used in combination therapy with an MMP-12 binding protein are described herein.

[0395] One or more small-molecule MMP inhibitors can be used in combination with one or more MMP-12 binding proteins described herein. For example, the combination can result in a lower dose of the small-molecule inhibitor being needed, such that side effects are reduced.

[0396] The MMP-12 binding proteins described herein can be administered in combination with one or more of the other therapies for treating cancers, including, but not limited to: surgery; radiation therapy, and chemotherapy. For example, proteins that inhibit MMP-12 or that inhibit a downstream event of MMP-12 activity can also be used in combination with other anti-cancer therapies, such as radiation therapy, chemotherapy, surgery, or administration of a second agent. For example, the second agent can be a Tie-1 inhibitor (e.g., Tie-1 binding proteins; see e.g., U.S. Ser. No. 11/199,739 and PCT/US2005/0284, both filed Aug. 9, 2005). As another example, the second agent can be one that targets or negatively regulates the VEGF signaling pathway. Examples of this latter class include VEGF antagonists (e.g., anti-VEGF antibodies such as bevacizumab) and VEGF receptor antagonists (e.g., anti-VEGF receptor antibodies). One particularly preferred combination includes bevacizumab. As a further example, the second agent is an inhibitor of plasmin, such as a kunitz domain-containing protein or polypeptide (e.g., a plasmin-inhibiting kunitz domain disclosed in U.S. Pat. No. 6,010,880, such as a protein or polypeptide comprising the amino acid sequence

| | |
|---|---|
| MHSFCAFKAETGPCRARFDRWFFNIFTRQC | (SEQ ID NO: 1)) |
| EEFIYGGCEGNQNRFESLEECKKMCTRD | |

As another example, the second agent is an agent that binds to Her2, such as a Her2-binding antibody (e.g., trastuzumab). The combination can further include 5-FU and leucovorin, and/or irinotecan.

[0397] Inhibitors of MMP-12 (e.g., the MMP-12 binding proteins disclosed herein) can potentiate the activity of an agent that targets Her2 (e.g., a Her2-binding antibody such as trastuzumab). Accordingly, in one combination therapy for the treatment of breast cancer, the second therapy is an agent that binds Her2, such as a Her2-binding antibody (e.g., trastuzumab). When an MMP-12 binding protein is used in a combination therapy with a Her2 binding agent, the dose of the Her2 binding agent may be reduced from the dose of the Her2 binding agent when administered not in combination with an MMP-12 binding protein (e.g., is at least 10%, 25%, 40%, or 50% less than the dose of the Her2 binding agent when administered not in combination with a MMP-12 binding protein). For example, the dose of trastuzumab, when administered in a combination therapy with an MMP-12 binding protein is less than about 4.0, 3.6, 3.0, 2.4, or 2 mg/kg as an initial (loading) dose, and less than about 2.0, 1.8, 1.5, 1.2, or 1 mg/kg in subsequent doses.

[0398] The MMP-12 binding proteins described herein can also be administered in combination with one or more other therapies for treating ocular disorders, such as surgical or medical (e.g., administration of a second agent) therapies. For example, in treatment of age-related macular degeneration (e.g., wet age-related macular degeneration), an MMP-12 binding protein may be administered in conjunction with (e.g., before, during, or after) laser surgery (laser photocoagulation or photocoagulation therapy). As another example, the MMP-12 binding protein can be administered in combination with a second agent, such as a VEGF antagonist (e.g., an anti-VEGF antibody such as bevacizumab or ranibizumab) or a VEGF receptor antagonist (e.g., anti-VEGF receptor antibodies).

[0399] Other combinations are described above.

[0400] The term “combination” refers to the use of the two or more agents or therapies to treat the same patient, wherein the use or action of the agents or therapies overlap in time. The agents or therapies can be administered at the same time (e.g., as a single formulation that is administered to a patient or as two separate formulations administered concurrently) or sequentially in any order. Sequential administrations are administrations that are given at different times. The time between administration of the one agent and another agent can be minutes, hours, days, or weeks. The use of an MMP-12 binding protein described herein can also be used to reduce the dosage of another therapy, e.g., to reduce the side-effects associated with another agent that is being administered, e.g., to reduce the side-effects of an anti-VEGF antibody such as bevacizumab. Accordingly, a combination can include administering a second agent at a dosage at least 10, 20, 30, or 50% lower than would be used in the absence of the MMP-12 binding protein.

[0401] In addition, a subject can be treated for an angiogenesis-associated disorder, e.g., a cancer, by administering to the subject a first and second agent. For example, the first agent modulates early stage angiogenesis and the second agent modulates a subsequent stage of angiogenesis or also modulates early stage angiogenesis. The first and second agents can be administered using a single pharmaceutical composition or can be administered separately. In one embodiment, the first agent is a VEGF pathway antagonist (e.g., an inhibitor of a VEGF (e.g., VEGF-A, -B, or -C) or a VEGF receptor (e.g., KDR or VEGF receptor III (Flt4)) or a bFGF pathway antagonist (e.g., an antibody that binds to bFGF or a bFGF receptor). Other VEGF pathway antagonists are also described, herein and elsewhere. In one embodiment, the second agent inhibits or decreases the mobility or invasiveness of tumor cells. For example, the second agent comprises an MMP-12 binding protein. For example, the second agent is an MMP-12 binding protein described herein.

[0402] Once a tumor reaches a certain size (e.g., ˜1-2 mm), the tumor requires new vasculature prior to increasing its mass. An early stage of tumor angiogenesis can include a signal from the tumor, e.g., secretion of VEGF, to stimulate the growth of new blood vessels from the host and infiltration of the tumor by the vessels. VEGF can, for example, stimulate proliferation of endothelial cells that are then assembled into blood vessels. A late stage of tumor growth can include metastasis, mobility and invasiveness of tumor cells. This mobility and invasiveness may involve the action of matrix metalloproteinases, e.g., MMP-12. Thus, an effective therapy to treat angiogenesis-related disorders can involve a combination of an agent that modulates an early stage angiogenesis (e.g., VEGF pathway antagonists, e.g., anti-VEGF (e.g., bevacizumab) or anti-VEGF receptor (e.g., anti-KDR) antibodies; or antagonists of other pro-angiogenic pathways, e.g., anti-bFGF antibodies or anti-bFGF receptor (e.g., anti-bFGF receptor-1, -2, -3) antibodies) and an agent that modulates a late stage of tumor growth can include metastasis, mobility and invasiveness of tumor cells s (e.g., antagonists of MMP-12 (e.g., anti-MMP-12 antibodies (e.g., an antibody disclosed herein)). One or more of these agents can be used in combination. One or more of these agents may also be used in combination with other anti-cancer therapies, such as radiation therapy or chemotherapy.

[0403] Exemplary VEGF receptor antagonists include inhibitors of a VEGF (e.g., VEGF-A, -B, or -C, for example bevacizumab), modulators of VEGF expression (e.g., INGN-241, oral tetrathiomolybdate, 2-methoxyestradiol, 2-methoxyestradiol nanocrystal dispersion, bevasiranib sodium, PTC-299, Veglin), inhibitors of a VEGF receptor (e.g., KDR or VEGF receptor III (Flt4), for example anti-KDR antibodies, VEGFR2 antibodies such as CDP-791, IMC-1121B, VEGFR2 blockers such as CT-322), VEGFR3 antibodies such as mF4-31C1 from Imclone Systems, modulators of VEGFR expression (e.g., VEGFR1 expression modulator Sirna-027) or inhibitors of VEGF receptor downstream signaling.

[0404] Exemplary inhibitors of VEGF include bevacizumab, pegaptanib, ranibizumab, NEOVASTAT®, AE-941, VEGF Trap, and PI-88.

[0405] Exemplary VEGF receptor antagonists include inhibitors of VEGF receptor tyrosine kinase activity. 4-[4-(1-Amino-1-methylethyl)phenyl]-2-[4-(2-morpholin-4-yl-ethyl)phenylamino]pyrimidine-5-carbonitrile (JNJ-17029259) is one of a structural class of 5-cyanopyrimidines that are orally available, selective, nanomolar inhibitors of the vascular endothelial growth factor receptor-2 (VEGF-R2). Additional examples include: PTK-787/ZK222584(Astra-Zeneca), SU5416, SU11248 (Pfizer), and ZD6474 ([N-(4-bromo-2-fluorophenyl)-6-methoxy-7-[(1-methylpiperidin-4-yl)methoxy]quinazolin-4-amine]), vandetanib, cediranib, AG-013958, CP-547632, E-7080, XL-184, L-21649, and ZK-304709. Other VEGF antagonist agents are broad specificity tyrosine kinase inhibitors, e.g., SU6668 (see, e.g., Bergers, B. et al., 2003 J. Clin. Invest. 111:1287-95), sorafenib, sunitinib, pazopanib, vatalanib, AEE-788, AMG-706, axitinib, BIBF-1120, SU-14813, XL-647, XL-999, ABT-869, BAY-57-9352, BAY-73-4506, BMS-582664, CEP-7055, CHIR-265, OSI-930, and TKI-258. Also useful are agents that down regulate VEGF receptors on the cell surface, such as fenretinide, and agents which inhibit VEGF receptor downstream signaling, such as squalamine

[0406] The second agent or therapy can also be another anti-cancer agent or therapy. Non-limiting examples of anti-cancer agents include, e.g., anti-microtubule agents, topoisomerase inhibitors, antimetabolites, mitotic inhibitors, alkylating agents, intercalating agents, agents capable of interfering with a signal transduction pathway, agents that promote apoptosis, radiation, and antibodies against other tumor-associated antigens (including naked antibodies, immunotoxins and radioconjugates). Examples of the particular classes of anti-cancer agents are provided in detail as follows: antitubulin/antimicrotubule, e.g., paclitaxel, vincristine, vinblastine, vindesine, vinorelbin, taxotere; topoisomerase I inhibitors, e.g., irinotecan, topotecan, camptothecin, doxorubicin, etoposide, mitoxantrone, daunorubicin, idarubicin, teniposide, amsacrine, epirubicin, merbarone, piroxantrone hydrochloride; antimetabolites, e.g., 5 fluorouracil (5 FU), methotrexate, 6 mercaptopurine, 6 thioguanine, fludarabine phosphate, cytarabine/Ara C, trimetrexate, gemcitabine, acivicin, alanosine, pyrazofurin, N-Phosphoracetyl-L-Asparate=PALA, pentostatin, 5 azacitidine, 5 Aza 2′ deoxycytidine, ara A, cladribine, 5 fluorouridine, FUDR, tiazofurin, N-[5-[N-(3,4-dihydro-2-methyl-4-oxoquinazolin-6-ylmethyl)-N-methylamino]-2-thenoyl]-L-glutamic acid; alkylating agents, e.g., cisplatin, carboplatin, mitomycin C, BCNU=Carmustine, melphalan, thiotepa, busulfan, chlorambucil, plicamycin, dacarbazine, ifosfamide phosphate, cyclophosphamide, nitrogen mustard, uracil mustard, pipobroman, 4 ipomeanol; agents acting via other mechanisms of action, e.g., dihydrolenperone, spiromustine, and desipeptide; biological response modifiers, e.g., to enhance anti-tumor responses, such as interferon; apoptotic agents, such as actinomycin D; and anti-hormones, for example anti-estrogens such as tamoxifen or, for example antiandrogens such as 4′-cyano-3-(4-fluorophenylsulphonyl)-2-hydroxy-2-methyl-3′-(trifluoromethyl) propionanilide.

[0407] A combination therapy can include administering an agent that reduces the side effects of other therapies. The agent can be an agent that reduces the side effects of anti-cancer treatments. For example, the agent can be leucovorin.

[0408] Combination therapies that include administering an MMP-12 binding protein or other binding protein described herein can also be used to treat a subject having or at risk for another angiogenesis related disorder (e.g., a disorder other than cancer, e.g., disorders that include undesired endothelial cell proliferation or undesirable inflammation, e.g., rheumatoid arthritis).

### Diagnostic Uses

[0409] Proteins that bind to MMP-12 and identified by the method described herein and/or detailed herein have in vitro and in vivo diagnostic utilities. The MMP-12 binding proteins described herein (e.g., the proteins that bind and inhibit, or the proteins that bind but do not inhibit MMP-12) can be used, e.g., for in vivo imaging, e.g., during a course of treatment for a disease or condition in which MMP-12 is active, e.g., a disease or condition described herein, or in diagnosing a disease or condition described herein.

[0410] In one aspect, the disclosure provides a diagnostic method for detecting the presence of an MMP-12, in vitro or in vivo (e.g., in vivo imaging in a subject). The method can include localizing MMP-12 within a subject or within a sample from a subject. With respect to sample evaluation, the method can include, for example: (i) contacting a sample with MMP-12 binding protein; and (ii) detecting location of the MMP-12 binding protein in the sample.

[0411] An MMP-12 binding protein can also be used to determine the qualitative or quantitative level of expression of MMP-12 in a sample. The method can also include contacting a reference sample (e.g., a control sample) with the binding protein, and determining a corresponding assessment of the reference sample. A change, e.g., a statistically significant change, in the formation of the complex in the sample or subject relative to the control sample or subject can be indicative of the presence of MMP-12 in the sample. In one embodiment, the MMP-12 binding protein does not cross react with another metalloproteinase.

[0412] The MMP-12 binding proteins are also useful for in vivo tumor imaging. Better clinical endpoints are needed to monitor the efficacy of drugs, such as MMP-inhibitors, that are designed to block enzymatic function (Zucker et al, 2001, Nature Medicine 7:655-656). Imaging of tumors in vivo by using labeled MMP-12 binding proteins could be of help to target the delivery of the binding protein to tumors for cancer diagnosis, intraoperative tumor detection, and for investigations of drug delivery and tumor physiology. MMP-12 binding proteins can be used to monitor native enzymatic activity in vivo at invasive sites. Another exemplary method includes: (i) administering the MMP-12 binding protein to a subject; and (iii) detecting location of the MMP-12 binding protein in the subject. The detecting can include determining location or time of formation of the complex.

[0413] The MMP-12 binding protein can be directly or indirectly labeled with a detectable substance to facilitate detection of the bound or unbound antibody. Suitable detectable substances include various enzymes, prosthetic groups, fluorescent materials, luminescent materials and radioactive materials.

[0414] Complex formation between the MMP-12 binding protein and MMP-12 can be detected by evaluating the binding protein bound to the MMP-12 or unbound binding protein.

[0415] Conventional detection assays can be used, e.g., an enzyme-linked immunosorbent assays (ELISA), a radioimmunoassay (RIA) or tissue immunohistochemistry. Further to labeling the MMP-12 binding protein, the presence of MMP-12 can be assayed in a sample by a competition immunoassay utilizing standards labeled with a detectable substance and an unlabeled MMP-12 binding protein. In one example of this assay, the biological sample, the labeled standards, and the MMP-12 binding protein are combined and the amount of labeled standard bound to the unlabeled binding protein is determined. The amount of MMP-12 in the sample is inversely proportional to the amount of labeled standard bound to the MMP-12 binding protein.

[0416] Fluorophore and chromophore labeled proteins can be prepared. Because antibodies and other proteins absorb light having wavelengths up to about 310 nm, the fluorescent moieties should be selected to have substantial absorption at wavelengths above 310 nm and preferably above 400 nm. A variety of suitable fluorescers and chromophores are described by Stryer, 1968, Science 162:526 and Brand, L. et al., 1972, Annu. Rev. Biochem. 41:843 868. The proteins can be labeled with fluorescent chromophore groups by conventional procedures such as those disclosed in U.S. Pat. Nos. 3,940,475, 4,289,747, and 4,376,110. One group of fluorescers having a number of the desirable properties described above is the xanthene dyes, which include the fluoresceins and rhodamines. Another group of fluorescent compounds are the naphthylamines. Once labeled with a fluorophore or chromophore, the protein can be used to detect the presence or localization of the MMP-12 in a sample, e.g., using fluorescent microscopy (such as confocal or deconvolution microscopy).

[0417] Histological Analysis. Immunohistochemistry can be performed using the proteins described herein. For example, in the case of an antibody, the antibody can be synthesized with a label (such as a purification or epitope tag), or can be detectably labeled, e.g., by conjugating a label or label-binding group. For example, a chelator can be attached to the antibody. The antibody is then contacted to a histological preparation, e.g., a fixed section of tissue that is on a microscope slide. After an incubation for binding, the preparation is washed to remove unbound antibody. The preparation is then analyzed, e.g., using microscopy, to identify if the antibody bound to the preparation.

[0418] Of course, the antibody (or other polypeptide or peptide) can be unlabeled at the time of binding. After binding and washing, the antibody is labeled in order to render it detectable.

[0419] Protein Arrays. The MMP-12 binding protein can also be immobilized on a protein array. The protein array can be used as a diagnostic tool, e.g., to screen medical samples (such as isolated cells, blood, sera, biopsies, and the like). Of course, the protein array can also include other binding proteins, e.g., that bind to MMP-12 or to other target molecules.

[0420] Methods of producing polypeptide arrays are described, e.g., in De Wildt et al., 2000, Nat. Biotechnol. 18:989-994; Lueking et al., 1999, Anal. Biochem. 270:103-111; Ge, 2000, Nucleic Acids Res. 28, e3, I-VII; MacBeath and Schreiber, 2000, Science 289:1760-1763; WO 01/40803 and WO 99/51773A1. Polypeptides for the array can be spotted at high speed, e.g., using commercially available robotic apparati, e.g., from Genetic MicroSystems or BioRobotics. The array substrate can be, for example, nitrocellulose, plastic, glass, e.g., surface-modified glass. The array can also include a porous matrix, e.g., acrylamide, agarose, or another polymer.

[0421] For example, the array can be an array of antibodies, e.g., as described in De Wildt, supra. Cells that produce the proteins can be grown on a filter in an arrayed format. Polypeptide production is induced, and the expressed polypeptides are immobilized to the filter at the location of the cell. A protein array can be contacted with a labeled target to determine the extent of binding of the target to each immobilized polypeptide. Information about the extent of binding at each address of the array can be stored as a profile, e.g., in a computer database. The protein array can be produced in replicates and used to compare binding profiles, e.g., of a target and a non-target.

[0422] FACS (Fluorescence Activated Cell Sorting). The MMP-12 binding protein can be used to label cells, e.g., cells in a sample (e.g., a patient sample). The binding protein is also attached (or attachable) to a fluorescent compound. The cells can then be sorted using fluorescence activated cell sorter (e.g., using a sorter available from Becton Dickinson Immunocytometry Systems, San Jose Calif.; see also U.S. Pat. Nos. 5,627,037; 5,030,002; and 5,137,809). As cells pass through the sorter, a laser beam excites the fluorescent compound while a detector counts cells that pass through and determines whether a fluorescent compound is attached to the cell by detecting fluorescence. The amount of label bound to each cell can be quantified and analyzed to characterize the sample.

[0423] The sorter can also deflect the cell and separate cells bound by the binding protein from those cells not bound by the binding protein. The separated cells can be cultured and/or characterized.

[0424] In Vivo Imaging. Also featured is a method for detecting the presence of a MMP-12 expressing tissues in vivo. The method includes (i) administering to a subject (e.g., a patient having, e.g., a cancer (e.g., metastatic cancer, e.g., metastatic breast cancer), an inflammatory disease (.g., chronic obstructive pulmonary disease (COPD), asthma, rhinitis (e.g., allergic rhinitis), inflammatory bowel disease, synovitis, rheumatoid arthritis), heart failure, septic shock, neuropathic pain, osteoarthritis, or an ocular condition (e.g., macular degeneration)) an anti-MMP-12 antibody, conjugated to a detectable marker; (ii) exposing the subject to a means for detecting said detectable marker to the MMP-12 expressing tissues or cells. For example, the subject is imaged, e.g., by NMR or other tomographic means.

[0425] Examples of labels useful for diagnostic imaging include radiolabels such as ¹³¹I, ¹¹¹In, ²³¹I, ^{99m}Tc, ³²P, ¹²⁵I, ³H, ¹⁴C, and ¹⁸⁸Rh, fluorescent labels such as fluorescein and rhodamine, nuclear magnetic resonance active labels, positron emitting isotopes detectable by a positron emission tomography (“PET”) scanner, chemiluminescers such as luciferin, and enzymatic markers such as peroxidase or phosphatase. Short range radiation emitters, such as isotopes detectable by short range detector probes can also be employed. The protein can be labeled with such reagents; for example, see Wensel and Meares, 1983, Radioimmunoimaging and Radioimmunotherapy, Elsevier, N.Y. for techniques relating to the radiolabeling of antibodies and D. Colcher et al., 1986, Meth. Enzymol. 121: 802 816.

[0426] The binding protein can be labeled with a radioactive isotope (such as ¹⁴C, ³H, ³⁵S, ¹²⁵I, ³²P, ¹³¹I). A radiolabeled binding protein can be used for diagnostic tests, e.g., an in vitro assay. The specific activity of a isotopically-labeled binding protein depends upon the half life, the isotopic purity of the radioactive label, and how the label is incorporated into the antibody.

[0427] In the case of a radiolabeled binding protein, the binding protein is administered to the patient, is localized to cells bearing the antigen with which the binding protein reacts, and is detected or “imaged” in vivo using known techniques such as radionuclear scanning using e.g., a gamma camera or emission tomography. See e.g., A. R. Bradwell et al., “Developments in Antibody Imaging”, Monoclonal Antibodies for Cancer Detection and Therapy, R. W. Baldwin et al., (eds.), pp 65 85 (Academic Press 1985). Alternatively, a positron emission transaxial tomography scanner, such as designated Pet VI located at Brookhaven National Laboratory, can be used where the radiolabel emits positrons (e.g., ¹¹C, ¹⁸F, ¹⁵O, and ¹³N).

[0428] MRI Contrast Agents. Magnetic Resonance Imaging (MRI) uses NMR to visualize internal features of living subject, and is useful for prognosis, diagnosis, treatment, and surgery. MRI can be used without radioactive tracer compounds for obvious benefit. Some MRI techniques are summarized in EP-A-0 502 814. Generally, the differences related to relaxation time constants T1 and T2 of water protons in different environments is used to generate an image. However, these differences can be insufficient to provide sharp high resolution images.

[0429] The differences in these relaxation time constants can be enhanced by contrast agents. Examples of such contrast agents include a number of magnetic agents paramagnetic agents (which primarily alter T1) and ferromagnetic or superparamagnetic (which primarily alter T2 response). Chelates (e.g., EDTA, DTPA and NTA chelates) can be used to attach (and reduce toxicity) of some paramagnetic substances (e.g., Fe⁺³, Mn⁺², Gd⁺³). Other agents can be in the form of particles, e.g., less than 10 mm to about 10 nM in diameter). Particles can have ferromagnetic, antiferromagnetic, or superparamagnetic properties. Particles can include, e.g., magnetite (Fe₃O₄), γ-Fe₂O₃, ferrites, and other magnetic mineral compounds of transition elements. Magnetic particles may include: one or more magnetic crystals with and without nonmagnetic material. The nonmagnetic material can include synthetic or natural polymers (such as sepharose, dextran, dextrin, starch and the like.

[0430] The MMP-12 binding protein can also be labeled with an indicating group containing of the NMR active ¹⁹F atom, or a plurality of such atoms inasmuch as (i) substantially all of naturally abundant fluorine atoms are the ¹⁹F isotope and, thus, substantially all fluorine containing compounds are NMR active; (ii) many chemically active polyfluorinated compounds such as trifluoracetic anhydride are commercially available at relatively low cost; and (iii) many fluorinated compounds have been found medically acceptable for use in humans such as the perfluorinated polyethers utilized to carry oxygen as hemoglobin replacements. After permitting such time for incubation, a whole body MRI is carried out using an apparatus such as one of those described by Pykett, 1982, Sci. Am. 246:78 88 to locate and image tissues expressing MMP-12.

[0431] The contents of all references, pending patent applications and published patents, cited throughout this application are hereby expressly incorporated by reference. The foilowing examples provide further illustrate and are not limiting.

### EXAMPLES

### Example 1

### Selection and Screening of Anti-MMP-12 Fabs and IgGs

[0432] Selection strategies employed to identify anti-MMP-12 antibodies are:
[0433] (1) Selection with capture of a biotinylated form of MMP-12 catalytic domain on a streptavidin coated surface;
[0434] (2) Selection with capture of a biotinylated form of proMMP-12 (APMA-activated) on a streptavidin coated surface;
[0435] (3) Phage, suitably depleted (e.g., previous contact with streptavidin) were allowed to interact with the target, unbound phage washed away and the output sampled and/or amplified for the next round of selection. This was repeated until the output phage in ELISA analysis indicate a high percentage of binders. The phage clones were converted into sFabs. 88/518 unique sFab were identified by ELISA and sequencing (campaign A) and 168 by sequencing (campaign B). Their ability to inhibit human MMP-12, murine MMP-12 and other MMPs (1, 2, 3, 7, 8, 9, 10, 13, 14, 16, 17 and 24) was determined by usual means. The sFabs were converted to IgG1s.

TABLE I

| | Unique | | | |
|---|---|---|---|---|
| | Positive | | | Specificity/ |
| | hits | Inhibitors | IC50 (nM) | Crossreactivity |
| MMP12 | 88 | 12 (14%) | 6 < sFab < 90 | 100% |
| Campaign A | | | | |
| MMP12 | 168 | 7 (4%) | 10 < sFab < 150 | 100% |
| Campaign B | | | | m/hu |

### Campaign A:

TABLE II
hMMP-12 inhibition Screen: IC₅₀ Values:

| | IC₅₀ (nM) | IC50 (nM) |
|---|---|---|
| Antibody name | Large scale purified Fabs | IgGs |
| 539A-M0013-D11 | 20.3 | 13.3 |
| 539A-M0013-G12 | 6.7 | 4.1 |
| 539A-M0013-H06 | 11.9 | 5.3 |
| 539A-M0014-C09 | 36.9 | 43.3 |
| 539A-M0014-G11 | 35.0 | 12.3 |
| 539A-M0016-A11 | 8.8 | 2.1 |
| 539A-M0016-H05 | 56.6 | 32.9 |
| 539A-M0019-C05 | 93.0 | 24.5 |
| 539A-M0020-B01 | 74.8 | 34.6 |
| 539A-M0022-C07 | 24.2 | 13.2 |
| 539A-M0027-E11 | 23.9 | 23.7 |

[0437] There was no crossreactivity to mouse MMP12.

TABLE III
Ki values of four of the Campaign A MMP-12
binding proteins that act as inhibitors:

| | IC50 values | Ki (nM) |
|---|---|---|
| 539A-M0016-A11 | 2.1 | 0.7 +/− 0.1 |
| 539A-M0013-D11 | 13.3 | 4.97 +/− 1.4 |
| 539A-M0013-G12 | 4.1 | 2.05 +/− 1.4 |
| 539A-M0013-H06 | 5.3 | 2.7 +/− 1.6 |

[0438] The Campaign A MMP-12 binding proteins were crossreacted against other human proteases. The results are provided in Table IV.

TABLE IV

| Anti MMP-12 IgG | MMP-9 | MMP-14 | hTACE |
|---|---|---|---|
| 539A-M0013-D11 | no | no | No |
| 539A-M0013-G12 | no | no | No |
| 539A-M0013-H06 | no | no | No |
| 539A-M0014-C09 | no | no | No |
| 539A-M0014-G11 | no | no | no |
| 539A-M0016-A11 | no | no | no |
| 539A-M0016-H05 | no | no | no |
| 539A-M0019-C05 | no | no | no |
| 539A-M0020-B01 | no | no | no |
| 539A-M0022-C07 | no | no | no |
| 539A-M0025-D04 | no | no | no |
| 539A-M0027-E11 | no | no | no |

[0439] Cross-reactivity of some of the campaign A MMP-12 binding proteins was assessed against other human proteases. The results are provided below.

TABLE V

| | 539A- | 539A- | 539A- | 539A- |
|---|---|---|---|---|
| | M0016-A11 | M0013-D11 | M0013-G12 | M0013-H06 |
| MMP-1 | no | no | no | no |
| MMP-2 | no | no | no | no |
| MMP-3 | no | no | no | no |
| MMP-7 | no | no | no | no |
| MMP-8 | no | no | no | no |
| MMP-10 | no | no | no | no |
| MMP-13 | no | no | no | no |
| MMP-16 | no | no | no | no |
| MMP-17 | no | no | no | no |
| MMP-24 | no | no | no | no |

[0440] Campaign B:

[0441] Three selection strategies were used. When the phage outputs in ELISA analysis indicate a high percentage of binders, the phage outputs were converted to sFabs. A high through-put sequencing campaign was done instead of high through-put ELISA and unique sFabs were recovered:
[0442] 1. Three rounds on mouse MMP12: HT sequencing: 153 unique clones
[0443] 2. Alternation (human-mouse MMP12): HT sequencing: 120 unique clones
[0444] 3. Alternation (5 human peptides-mouse MMP12): not pursued 13 inhibitors of mouse MMP-12 were identified including 1 that is cross reactive with human MMP-12.

[0445] The following peptides were designed:

TABLE VI

| Peptide | Size | location |
|---|---|---|
| GDAHFDEDEFWT | 12AA | 13AA upstream the Zn |
| | | binding site |
| GTNLFLTAVHEIGHSLGL | 18AA | Overlap with Zn binding |
| | | site |
| HEIGHSLGLGHS | 12AA | Zn binding motif |
| TYRINNYTPDMNREDVDY | 18AA | N′term part of the |
| | | catalytic domain |
| TFRLSADDIRGIQSLYG | 17AA | 17AA downstream the Zn |
| | | binding motif |

[0446] BIOTIN-CG XXXXXXXXXXXXXXXXXX-COOH

[0447] Several MMP-12 non-inhibitor antibodies were identified for Campaign B. These antibodies are described in FIG. 1.

[0448] In addition, several MMP-12 antibody inhibitors of huMMP12 were identified (100 nM):

TABLE VII

| | | % of activity | % of activity |
|---|---|---|---|
| REARRAY | MASTER | left with 100 | left with 100 |
| PLATE NAME | PLATE NAME | nM in assay | nM in assay |
| & WELL # | & WELL # | 04 Oct. 2006 | 29 Aug. 2006 |
| 539B-R0060-A06 | 539B-M0031-A06 | 126.3 | ND |
| 539B-R0060-C04 | 539B-M0034-C04 | 38.6 | 39.1 |
| 539B-R0060-G03 | 539B-M0039-F01 | 69.4 | 57.8 |
| 539B-R0061-A09 | 539B-M0041-B05 | 35.1 | ND |
| 539B-R0061-B04 | 539B-M0041-G01 | 108.6 | 84.8 |
| 539B-R0061-B07 | 539B-M0042-B06 | 53.6 | ND |
| 539B-R0062-A02 | 539B-M0006-B10 | 68.9 | 65.5 |
| 539B-R0062-B08 | 539B-M0007-H06 | 55.5 | 55.0 |
| 539B-R0062-C10 | 539B-M0008-H09 | 4.6 | 30.0 |
| 539B-R0062-D07 | 539B-M0009-H08 | 102.7 | ND |
| 539B-R0062-E11 | 539B-M0011-H11 | 12.2 | ND |
| 539B-R0062-F10 | 539B-M0015-F02 | 84.1 | ND |
| 539B-R0062-F11 | 539B-M0016-D01 | 48.1 | ND |

[0449] As shown in FIG. 2, 539B-M0008-H09 is cross reactive with human MMP-12 and murine MMP-12. 539B-M0008-H09 showed a linear relationship between IC₅₀ and concentration (μM) for both human MMP-12 and murione MMP-12, see FIG. 3. The Ki of 539B-M0008-H09 for human MMP-12 is 2.8±0.8 nM and the Km is 16±6 μM. The Ki of 539B-M0008-H09 for murine MMP-12 is 2.2±0.6 nM and the Km is 42±17 μM.

[0450] In addition, 539B-M0011-H11 was found to be an inhibitor of murine MMP-12 but not human MMP-12. This is shown in FIG. 4.

[0451] The cross reactivity of several MMP-12 binding proteins from Campaign B was assessed for cross reactivity with other MMPs.

TABLE VIII

| | | | M08H09 IgG, |
|---|---|---|---|
| | M0016-A11 IgG | M0013-G12 IgG | 400 nM |
| | a-huMMP12 | a-huMMP12 | crossreactive |
| MMP-1 | N | N | N |
| MMP-2 | N | N | N |
| MMP-3 | N | N | N |
| MMP-7 | N | N | N |
| MMP-8 | N | N | N |
| MMP-9 (m/hu) | N | N | N |
| MMP-10 | N | N | N |
| MMP-12 | Y* | Y* | Y* |
| MMP-13 | N | N | N |
| MMP-14 | N | N | N |
| MMP-15 | N | N | N |
| MMP-16 | N | N | N |
| MMP-17 | N | N | N |
| MMP-24 | N | N | N |

[0452] As shown in FIG. 5, using ELIA competition binding assays, it was shown that M08H09 cross reacts with human and murine MMP-12, M0013-G12 and M0016-A11 inhibit human MMP-12 and R0062-E11 inhibits murine MMP-12.

### Example 2

### Evaluation of M08-H09 on Inflammation

[0453] The purpose of the following experiments was to determine the effect of 539B-M008-H09 (M08-H09) on inflammation and specifically on inflammatory cell infiltration into the carrageenan-stimulated mouse air pouch and on the OVA-challenged mouse model.

[0454] For the OVA-challenged mouse model, the mice were sensitized by IP administration of OVA/Alum on day 0 and day 7. Six hours prior to OVA challenge, M08-H09 was administered IP to the mice. The mice were challenged by pulmonary administration of OVA. On day 26, metacholine induction and airway hyperresponsiveness was measured. Six different groups were tested. Group 1 was a control group that received PBS. Grous 2, 3, 4 and 5 were administered M08-H09 at doses of 1 mg/kg, 5 mg/kg, 10 mg/kg and 25 mg/kg. Group 6 was administered 25 mg/kg of M1-H11.

[0455] The OVA challenged mice were assessed for BAL inflammation based upon differential cell counts, lung histology by quantifying global inflammation, measurement of airway responsiveness to metacholine challenge, IL-4, IL-5 and IL-13 ELISA measurement of BAL or protein lung extracts, serum specific IgE measurement, lung histology using congo red staining to determine eosinophil counts around bronchi and measurement of MMP-12 activity in the lungs using a fluorogenic substrate.

[0456] As shown in FIG. 6, M08-H09 at all doses resulted in a decrease in the peribronchial inflammation score. A significant decrease was seen at 10 mg/kg and 25 mg/kg doses of M08-H09.

[0457] As shown in FIG. 7, the differential cell counts showed that M08-H09 results in eosinophil percentages that are decreased.

[0458] For the carrageenan-stimulated mouse air pouch model, subcutaneous injection of air into the hind flank or back of mice produces an air pouch in a week, the interior surface of which contains both fibroblast-like and macrophage-like cells. Inflammatory stimulation of the pouch results in leukocyte recruitment to the pouch and release of mediators (cytokines) into the exudate. Preventing inflammatory cell infiltration into the air pouch may translate into preventing inflammation of the synovium in rheumatoid arthritis.

[0459] The effect of M08-H09 on inflammatory cell infiltration was compared to inflammatory cell infiltration indomethacin and a control (PBS). In addition, inflammatory cell recruitment was compared to an unstimulated mouse. As shown in FIG. 8, M08-H09 significantly decreased total white blood cell infiltration and specifically neutrophil and lymphocyte infiltration.

### Example 3

### Affinity Matured Variants of M08-H09

[0460] Table IX summarizes cycle 1 of the affinity maturation of M08-H09.

TABLE IX

| | | |
|---|---|---|
| | Inhibition assays | BIACORE |
| N- | (sFAB) | (coated Fab) |

| | | | | | | | | |
|---|---|---|---|---|---|---|---|---|
| Initial Name | Selection method | HV-CDR1 | HV-CDR2 | Gly | IC50 hu (nM) | IC50 m | KD hu | koff m (1/s) |

| | | | | | | | | |
|---|---|---|---|---|---|---|---|---|
| 539B-M0008-H09 | | DYNMH | YIGPSGGYTHYADSVKG | 1 | 12.1 + 2.5 | <10 | 1.77E−08 | 4.00E−03 |
| 539B-M0063-B01 | straight human | WYWMG | SISPSGGYTFYADSVKG | 1 | 0.7 + 0.1 | >10 | 1.71E−10 | 2.50E−03 |
| 539B-M0063-B11 | straight human | PYWMH | GIGPSGGLTFYADSVKG | 1 | 0.7 + 0.1 | >10 | 1.20E−10 | 3.11E−03 |
| 539B-M0063-C07 | straight human | PYWMS | GISPSGGITFYADSVKG | 1 | 1.0 + 0.1 | <10 | 2.29E−09 | 2.00E−03 |
| 539B-M0063-G01 | straight human | WYWMV | SIGPSGGDTYYADSVKG | 1 | 0.8 + 0.1 | >10 | 1.58E−09 | 6.54E−03 |
| 539B-M0065-E12 | straight mouse | WYNMH | GISPSGGNTMYADSVKG | 1 | 1.4 + 0.1 | <10 | ND | ND |
| 539B-M0065-G03 | straight mouse | WYGMG | VIVSSGGFTQYADSVKG | 1 | 3.0 + 0.2 | <10 | ND | ND |
| 539B-M0065-H05 | straight mouse | YYGMG | VISSSGGFTFYADSVKG | 1 | 0.7 + 0.1 | ND | 2.19E−09 | ND |
| 539B-M0067-B06 | alternate | WYWMH | GIVSSGGTTIYADSVKG | 1 | 0.7 + 0.1 | <10 | 6.20E−10 | ND |
| 539B-M0067-F06 | alternate | WYNMS | RISPSGGDTGYADSVKG | 2 | 0.7 + 0.1 | <10 | 2.03E−10 | 2.50E−04 |
| 539B-M0069-C02 | TIMP + MMP12 | YYNMH | GIGPSGGGTLYADSVKG | 1 | 1.6 + 0.2 | ~10 | 6.97E−09 | ND |
| 539B-M0069-D10 | TIMP + MMP12 | LYHMH | GIGPSGGWTIYADSVKG | 1 | 2.3 + 0.1 | <10 | ND | ND |
| 539B-M0071-A01 | Lead + MMP12 | EYWMT | GISPSGGMTFYADSVKG | 1 | 0.3 + 0.1 | >10 | 1.10E−09 | 1.00E−02 |
| 539B-M0071-D09 | Lead + MMP12 | PYWMH | GISSSGGDTLYADSVKG | 1 | 2.4 + 0.2 | <10 | ND | ND |
| 539B-M0071-H03 | Lead + MMP12 | PYWMH | GIGPSGGPTFYADSIKG | 1 | 0.2 + 0.1 | <10 | 1.03E−09 | ND |

KD_{hUMMP12} improvement ~10-100x
Koff_{mMMP12} improvement ~2-10x

[0461] In cycle II of the affinity maturation, 109 Fabs were analyzed and 26 Fabs were selected as improved inhibitors. The IC₅₀ on human and murine MMP-12 was measured and an affinity ranking on human and murine MMP-12 was performed. For this analysis, 4 Fabs were selected and reformatted as IgGs. These four IgGs are described below in Table X:

TABLE X

| | | Sequence | | | | | | | | | | | | | | | | | | | | | | | | | | |
|---|---|---|---|---|---|---|---|---|---|---|---|---|---|---|---|---|---|---|---|---|---|---|---|---|---|---|---|---|
| Name | Specie | HC-CDR1 | | | | | HC-CDR2 | | | | | | | | | | | | | | | | | HC-CDR3 | | | | |
| MOR-H09 | Fab | D | Y | N | M | H | Y | I | G | P | S | G | G | Y | T | H | Y | A | D | S | V | K | C | D | I | R | G | A |
| M131 A06 | Fab | W | Y | W | M | H | | I | | P | S | C | C | | T | | Y | A | D | S | V | K | C | D | I | V | C | P |
| M121-E07 | Fab | W | Y | G | M | H | | I | | | S | G | G | | T | | T | A | D | S | V | K | G | D | I | R | G | V |
| M118-F11 | Fab | Y | Y | N | M | H | | I | | P | S | G | G | | T | | Y | A | D | S | V | K | G | D | I | I | G | A |
| M130-C12 | Fab | K | Y | N | M | H | | T | | P | S | G | G | | T | H | Y | A | D | S | V | K | G | D | T | R | G | A |

| | Sequence | | | | | | | | Human MMP12 | | | Mouse MMP12 | | |
|---|---|---|---|---|---|---|---|---|---|---|---|---|---|---|
| Name | HC-CDR3 | | | | | | | | IC50 | Kd (nM) | off rate | IC50 | Kd (nM) | off rate |
| MOR-H09 | Y | S | S | G | L | F | D | Y | 14 | 18 | 9.54E−03 | <10 | | 4.00E−03 |
| M131 A06 | Y | S | A | C | L | F | D | Y | 0.299 | 0.18 | 1.91E 04 | <10 | | 4.84E 05 |
| M121-E07 | F | L | S | G | L | F | D | H | 0.006 | 0.197 | 1.41E−04 | <10 | | 1.15E−04 |
| M118-F11 | Y | S | A | G | L | F | D | L | 0.914 | 1.17 | 4.13E−04 | <10 | | 1.93E−04 |
| M130-C12 | Y | S | A | G | T | F | D | Y | 0.688 | | | <10 | | |

[0462] Inhibition assays of the affinity matured clones were performed. The results are provided below in Table XI.

TABLE XI

| | | | | | | |
|---|---|---|---|---|---|---|
| KD huMMP12 (nM) | 0.62 | 2.2 | 0.68 | 0.18 | 0.197 | 1.17 |

| | | | 539B- | | | | | |
|---|---|---|---|---|---|---|---|---|
| | Dilution of | Substrate | M067-B06 | 5390-M065-H05 | 539B-M130-C12 | 539B-M131-A06 | 539B-M121-E07 | 539B-M118-F11 |
| | enzyme | used | IgG at 1 μM | IgG at 0.5 μM | Fab at 1 μM | Fab at 1 μM | Fab at 1 μM | Fab at 1 μM |
| hMMP1 | 1/300 | M-2350 | 99 | 121 | 125 | 159 | 148 | 133 |
| hMMP2 | 1/500 | M-2350 | 95 | 105 | 113 | 128 | 108 | 120 |
| hMMP3 | 1/200 | M-2225 | 104 | ND | 121 | 110 | 97 | 102 |
| hMMP7 | 1/500 | M-2350 | 102 | 128 | 11⁷ | 115 | 113 | 112 |
| hMMP8 | 1/1000 | M-2350 | 106 | 114 | 131 | 107 | 107 | 127 |
| hMMP9 | 1/500 | M-2350 | 77 | 96 | 11⁷ | 107 | 111 | 116 |
| hMMP10 | 1/100 | M-2350 | 109 | ND | 106 | 124 | 123 | 127 |
| hMMP12 | 1/500 | M-2350 | 0 | 0 | 0 | 2 | 3 | 1 |
| hMMP12 | 1/400 | M-2225 | 2 | ND | 1 | 0 | 0 | 0 |
| hMMP13 | 1/5000 | M-2350 | 102 | ND | 88 | 100 | 89 | 103 |
| hMMP14 | 1/1000 | M-2350 | 93 | ND | 135 | 120 | 143 | 124 |

[0463] 539B-M131A06 was cross reactive with human and murine MMP-12. It has a IC₅₀ or Ki of <0.3 nM and a KD of 180 μM for human MMP-12 and 73-150 μM for murine MMP-12.

### Example 4

### Modification of 539B-M131-A06 (M131A06) to Remove a Glycosylation Site in CDR1 of the Variable Light Chain

[0464] As shown in FIG. 9, CDR 1 of the variable light chain of M131A06 was modified to remove a glycosylation site. Removal of the glycosylation site in CDR1 did not effect binding of M131A06 to MMP-12. The MMP-12 antibody with the glycosylation site removed is referred to as 539B-M131A06-GA-S.

### Example 5

[0465] FIG. 10 summarizes the identification of amino acid changes in affinity matured variant HV-CDRs (cycles 1 and 2) that contribute to improvement in affinity and inhibition properties.

TABLE XII

| DX | ID | |
|---|---|---|
| number | NO. | Clone origin |
| DX-2712 | 1 | 539B-M0131-A06-GA-S |
| | 2 | 539B-M0008-H09-GA-S |
| | 3 | 539B-M0121-E07-GA-S |

| ID NO. | VL |
|---|---|
| 1 | DIQMTQSPSSLSASVGDRVTITCRASQSIYTYLNWYQQ |
| | KPGKAPKLLIYAASSLQSGVPSRFSGSGSGTDFTLTISS |
| | LQPEDFATYYCQQAGIFGQGTKLEIK |
| 2 | DIQMTQSPSSLSASVGDRVTITCRASQSIYTYLNWYQQ |
| | KPGKAPKLLIYAASSLQSGVPSRFSGSGSGTDFTLTISS |
| | LQPEDFATYYCQQAGIFGQGTKLEIK |
| 3 | DIQMTQSPSSLSASVGDRVTITCRASQSIYTYLNWYQQ |
| | KPGKAPKLLIYAASSLQSGVPSRFSGSGSGTDFTLTISS |
| | LQPEDFATYYCQQAGIFGQGTKLEIK |
| ID NO. | CL |
| 1 | RTVAAPSVFIFPPSDEQLKSGTASVVCLLNNFYPREAK |
| | VQWKVDNALQSGNSQESVTEQDSKDSTYSLSSTLTLSK |
| | ADYEKHKVYACEVTHQGLSSPVTKSFNRGEC |
| 2 | RTVAAPSVFIFPPSDEQLKSGTASVVCLLNNFYPREAK |
| | VQWKVDNALQSGNSQESVTEQDSKDSTYSLSSTLTLSK |
| | ADYEKHKVYACEVTHQGLSSPVTKSFNRGEC |
| 3 | RTVAAPSVFIFPPSDEQLKSGTASVVCLLNNFYPREAK |
| | VQWKVDNALQSGNSQESVTEQDSKDSTYSLSSTLTLSK |
| | ADYEKHKVYACEVTHQGLSSPVTKSFNRGEC |
| ID NO. | VH |
| 1 | EVQLLESGGGLVQPGGSLRLSCAASGFTFSWYWMHW |
| | VRQAPGKGLEWVSGISPSGGMTMYADSVKGRFTISRDN |
| | SKNTLYLQMNSLRAEDTAVYYCARDIVGPYSAGLFDYWG |
| | RGTLVTVSS |
| 2 | EVQLLESGGGLVQPGGSLRLSCAASGFTFSDYNMHW |
| | VRQAPGKGLEWVSYIGPSGGYTHYADSVKGRFTISRD |
| | NSKNTLYLQMNSLRAEDTAVYYCAKDIRGAYSSGLFD |
| | YWGRGTLVTVSS |
| 3 | EVQLLESGGGLVQPGGSLRLSCAASGFTFSWYGMHW |
| | VRQAPGKGLEWVSGIVSSGGETFYADSVKGRFTISRDN |
| | SKNTLYLQMNSLRAEDTAVYYCAKDIRGVFLSGLFDHW |
| | GRGTLVTVSS |
| ID NO. | CH |
| 1 | ASTKGPSVFPLAPSSKSTSGGTAALGCLVKDYFPEPVT |
| | VSWNSGALTSGVHTFPAVLQSSGLYSLSSVVTVPSSSLG |
| | TQTYICNVNHKPSNTKVDKRVEPKSCDKTHTCPPCPAPEL |
| | LGGPSVFLFPPKPKD |
| | TLMI |
| | SRTPEVTCVVVDVSHEDPEVKFNWYVDGVEVHNAKTKP |
| | REEQYNSTYRVVSVLTVLHQDWLNGKEYKCKVSNKALPA |
| | PIEKTISKAKGQPREPQVYTLPPSREEMTKNQVSLTCLVK |
| | GFYPSDIAVEWESNG |
| | QPEN |
| | NYKTTPPVLDSDGSFFLYSKLTVDKSRWQQGNVFSCSV |
| | MHEALHNHYTQKSLSLSPGK |
| 2 | ASTKGPSVFPLAPSSKSTSGGTAALGCLVKDYFPEP |
| | VTVSWNSGALTSGVHTFPAVLQSSGLYSLSSVVTVPSS |
| | SLGTQTYICNVNHKPSNTKVDKRVEPKSCDKTHTCPPCPA |
| | PELLGGPSVFLFPPKPKDTLMIS |
| | RTPEVTCVVVDVSHEDPEVKFNWYVDGVEVHNAKTKPRE |
| | EQYNSTYRVVSVLTVLHQDWLNGKEYKCKVSNKALPAPIEK |
| | TISKAKGQPREPQVYTLPPSREEMTKNQVSLTCLVKGFYP |
| | SDIAVEWESNGQPEN |
| | NYKTTPPVLDSDGSFFLYSKLTVDKSRWQQGNVFSCSV |
| | MHEALHNHYTQKSLSLSPGK |
| 3 | ASTKGPSVFPLAPSSKSTSGGTAALGCLVKDYFPEPVTV |
| | SWNSGALTSGVHTFPAVLQSSGLYSLSSVVTVPSSSLG |
| | TQTYICNVNHKPSNTKVDKRVEPKSCDKTHTCPPCPAP |
| | ELLGGPSVFLFPPKPKDTLMI |
| | SRTPEVTCVVVDVSHEDPEVKFNWYVDGVEVHNAKTK |
| | PREEQYNSTYRVVSVLTVLHQDWLNGKEYKCKVSNKAL |
| | PAPIEKTISKAKGQPREPQVYTLPPSREEMTKNQVSLTC |
| | LVKGFYPSDIAVEWESNGQPEN |
| | NYKTTPPVLDSDGSFFLYSKLTVDKSRWQQGNVFSCSV |
| | MHEALHNHYTQKSLSLSPGK |

[0466] Cycle I Fab Inhibitor Sequences—Light Chain

| | | | | LV- | | | | |
|---|---|---|---|---|---|---|---|---|
| Initial Name | LV-FR1 | LV-CDR1 | LV-FR2 | CDR2 | LV-FR3 | LV-CDR3 | LV-FR4 | L-Constant |
| 539B-M0063- | QDIQMTQSPSSLSASVGDRVTITC | RANQSIYTYLN | WYQQKPGKAPELLIY | AASSLQS | GVPSRFSGSGSGTDFTLTISSLQPEDFATYYC | QQAGI | FGQGTKLEIK | RTVAAPS |
| A02 | | | | | | | | |
| 539B-M0063- | QDIQMTQSPSSLSASVGDRVTITC | RANQSIYTYLN | WYQQKPGKAPELLIY | AASSLQS | GVPSRFSGSGSGTDFTLTISSLQPEDFATYYC | QQAGI | FGQGTKLEIK | RTVAAPS |
| A04 | | | | | | | | |
| 539B-M0063- | QDIQMTQSPSSLSASVGDRVTITC | RANQSIYTYLN | WYQQKPGKAPELLIY | AASSLQS | GVPSRFSGSGSGTDFTLTISSLQPEDFATYYC | QQAGI | FGQGTKLEIK | RTVAAPS |
| B01 | | | | | | | | |
| 539B-M0063- | QDIQMTQSPSSLSASVGDRVTITC | RANQSIYTYLN | WYQQKPGKAPELLIY | AASSLQS | GVPSRFSGSGSGTDFTLTISSLQPEDFATYYC | QQAGI | FGQGTKLEIK | RTVAAPS |
| B11 | | | | | | | | |
| 539B-M0063- | QDIQMTQSPSSLSASVGDRVTITC | RANQSIYTYLN | WYQQKPGKAPELLIY | AASSLQS | GVPSRFSGSGSGTDFTLTISSLQPEDFATYYC | QQAGI | FGQGTKLEIK | RTVAAPS |
| C07 | | | | | | | | |
| 539B-M0063- | QDIQMTQSPSSLSASVGDRVTITC | RANQSIYTYLN | WYQQKPGKAPELLIY | AASSLQS | GVPSRFSGSGSGTDFTLTISSLQPEDFATYYC | QQAGI | FGQGTKLEIK | RTVAAPS |
| G01 | | | | | | | | |
| 5398-M0065- | QDIQMTQSPSSLSASVGDRVTITC | RANQSIYTYLN | WYQQKPGKAPELLIY | AASSLQS | GVPSRFSGSGSGTDFTLTISSLQPEDFATYYC | QQAGI | FGQGTKLEIK | RTVAAPS |
| E12 | | | | | | | | |
| 539B-M0065- | QDIQMTQSPSSLSASVGDRVTITC | RANQSIYTYLN | WYQQKPGKAPELLIY | AASSLQS | GVPSRFSGSGSGTDFTLTISSLQPEDFATYYC | QQAGI | FGQGTKLEIK | RTVAAPS |
| G03 | | | | | | | | |
| 539B-M0065- | QDIQMTQSPSSLSASVGDRVTITC | RANQSIYTYLN | WYQQKPGKAPELLIY | AASSLQS | GVPSRFSGSGSGTDFTLTISSLQPEDFATYYC | QQAGI | FGQGTKLEIK | RTVAAPS |
| H05 | | | | | | | | |
| 539B-M0067- | QDIQMTQSPSSLSASVGDRVTITC | RANQSIYTYLN | WYQQKPGKAPELLIY | AASSLQS | GVPSRFSGSGSGTDFTLTISSLQPEDFATYYC | QQAGI | FGQGTKLEIK | RTVAAPS |
| A02 | | | | | | | | |
| 539B-M0067- | QDIQMTQSPSSLSASVGDRVTITC | RANQSIYTYLN | WYQQKPGKAPELLIY | AASSLQS | GVPSRFSGSGSGTDFTLTISSLQPEDFATYYC | QQAGI | FGQGTKLEIK | RTVAAPS |
| B06 | | | | | | | | |
| 539B-M0067- | QDIQMTQSPSSLSASVGDRVTITC | RANQSIYTYLN | WYQQKPGKAPELLIY | AASSLQS | GVPSRFSGSGSGTDFTLTISSLQPEDFATYYC | QQAGI | FGQGTKLEIK | RTVAAPS |
| B09 | | | | | | | | |
| 539B-M0067- | QDIQMTQSPSSLSASVGDRVTITC | RANQSIYTYLN | WYQQKPGKAPELLIY | AASSLQS | GVPSRFSGSGSGTDFTLTISSLQPEDFATYYC | QQAGI | FGQGTKLEIK | RTVAAPS |
| C10 | | | | | | | | |
| 539B-M0067- | QDIQMTQSPSSLSASVGDRVTITC | RANQSIYTYLN | WYQQKPGKAPELLIY | AASSLQS | GVPSRFSGSGSGTDFTLTISSLQPEDFATYYC | QQAGI | FGQGTKLEIK | RTVAAPS |
| F02 | | | | | | | | |
| 539B-M0067- | QDIQMTQSPSSLSASVGDRVTITC | RANQSIYTYLN | WYQQKPGKAPELLIY | AASSLQS | GVPSRFSGSGSGTDFTLTISSLQPEDFATYYC | QQAGI | FGQGTKLEIK | RTVAAPS |
| F06 | | | | | | | | |
| 539B-M0069- | QDIQMTQSPSSLSASVGDRVTITC | RANQSIYTYLN | WYQQKPGKAPELLIY | AASSLQS | GVPSRFSGSGSGTDFTLTISSLQPEDFATYYC | QQAGI | FGQGTKLEIK | RTVAAPS |
| A04 | | | | | | | | |
| 539B-M0069- | QDIQMTQSPSSLSASVGDRVTITC | RANQSIYTYLN | WYQQKPGKAPELLIY | AASSLQS | GVPSRFSGSGSGTDFTLTISSLQPEDFATYYC | QQAGI | FGQGTKLEIK | RTVAAPS |
| A11 | | | | | | | | |
| 539B-M0069- | QDIQMTQSPSSLSASVGDRVTITC | RANQSIYTYLN | WYQQKPGKAPELLIY | AASSLQS | GVPSRFSGSGSGTDFTLTISSLQPEDFATYYC | QQAGI | FGQGTKLEIK | RTVAAPS |
| C02 | | | | | | | | |
| 539B-M0069- | QDIQMTQSPSSLSASVGDRVTITC | RANQSIYTYLN | WYQQKPGKAPELLIY | AASSLQS | GVPSRFSGSGSGTDFTLTISSLQPEDFATYYC | QQAGI | FGQGTKLEIK | RTVAAPS |
| D10 | | | | | | | | |
| 539B-M0069- | QDIQMTQSPSSLSASVGDRVTITC | RANQSIYTYLN | WYQQKPGKAPELLIY | AASSLQS | GVPSRFSGSGSGTDFTLTISSLQPEDFATYYC | QQAGI | FGQGTKLEIK | RTVAAPS |
| G07 | | | | | | | | |
| 539B-M0071- | QDIQMTQSPSSLSASVGDRVTITC | RANQSIYTYLN | WYQQKPGKAPELLIY | AASSLQS | GVPSRFSGSGSGTDFTLTISSLQPEDFATYYC | QQAGI | FGQGTKLEIK | RTVAAPS |
| A01 | | | | | | | | |
| 539B-M0071- | QDIQMTQSPSSLSASVGDRVTITC | RANQSIYTYLN | WYQQKPGKAPELLIY | AASSLQS | GVPSRFSGSGSGTDFTLTISSLQPEDFATYYC | QQAGI | FGQGTKLEIK | RTVAAPS |
| B07 | | | | | | | | |
| 539B-M0071- | QDIQMTQSPSSLSASVGDRVTITC | RANQSIYTYLN | WYQQKPGKAPELLIY | AASSLQS | GVPSRFSGSGSGTDFTLTISSLQPEDFATYYC | QQAGI | FGQGTKLEIK | RTVAAPS |
| D05 | | | | | | | | |
| 539B-M0071- | QDIQMTQSPSSLSASVGDRVTITC | RANQSIYTYLN | WYQQKPGKAPELLIY | AASSLQS | GVPSRFSGSGSGTDFTLTISSLQPEDFATYYC | QQAGI | FGQGTKLEIK | RTVAAPS |
| D09 | | | | | | | | |
| 539B-M0071- | QDIQMTQSPSSLSASVGDRVTITC | RANQSIYTYLN | WYQQKPGKAPELLIY | AASSLQS | GVPSRFSGSGSGTDFTLTISSLQPEDFATYYC | QQAGI | FGQGTKLEIK | RTVAAPS |
| H03 | | | | | | | | |
| 539B-M0071- | QDIQMTQSPSSLSASVGDRVTITC | RANQSIYTYLN | WYQQKPGKAPELLIY | AASSLQS | GVPSRFSGSGSGTDFTLTISSLQPEDFATYYC | QQAGI | FGQGTKLEIK | RTVAAPS |
| H06 | | | | | | | | |
| 539B-M0087- | QDIQMTQSPSSLSASVGDRVTITC | RANQSIYTYLN | WYQQKPGKAPELLIY | AASSLQS | GVPSRFSGSGSGTDFTLTISSLQPEDFATYYC | QQAGI | FGQGTKLEIK | RTVAAPS |
| F09 | | | | | | | | |
| 539B-M0088- | QDIQMTQSPSSLSASVGDRVTITC | RANQSIYTYLN | WYQQKPGKAPELLIY | AASSLQS | GVPSRFSGSGSGTDFTLTISSLQPEDFATYYC | QQAGI | FGQGTKLEIK | RTVAAPS |
| F07 | | | | | | | | |
| 539B-M0088- | QDIQMTQSPSSLSASVGDRVTITC | RASQSISSYLN | WYQQKPGKAPELLIY | AASSLQS | GVPSRFSGSGSGTDFTLTISSLQPEDFATYYC | QQSYSTPRT | FGQGTKLEIK | RTVAAPS |
| G10 | | | | | | | | |
| 539B-M0088- | QDIQMTQSPSSLSASVGDRVTITC | RANQSIYTYLN | WYQQKPGKAPELLIY | AASSLQS | GVPSRFSGSGSGTDFTLTISSLQPEDFATYYC | QQAGI | FGQGTKLEIK | RTVAAPS |
| H10 | | | | | | | | |
| 539B-M0089- | QDIQMTQSPSSLSASVGDRVTITC | RANQSIYTYLN | WYQQKPGKAPELLIY | AASSLQS | GVPSRFSGSGSGTDFTLTISSLQPEDFATYYC | QQAGI | FGQGTKLEIK | RTVAAPS |
| C01 | | | | | | | | |
| 539B-M0089- | QDIQMTQSPSSLSASVGDRVTITC | RANQSIYTYLN | WYQQKPGKAPELLIY | AASSLQS | GVPSRFSGSGSGTDFTLTISSLQPEDFATYYC | QQAGI | FGQGTKLEIK | RTVAAPS |
| F05 | | | | | | | | |
| 539B-M0089- | QDIQMTqSPGTLSLSPGERATMSC | RASQSFTGSYLA | WYQQKPGLAPRLLIY | DASSRAA | GIPDRFSGSGSGTDFTLTISRLEPEDFAVYYC | QQYGTSPPWA | FGQGTKVEIK | RTVAAPS |
| B07 | | | | | | | | |
| 539B-M0089- | QDIQMTQSPSSLSASVGDRVTITC | RANQSIYTYLN | WYQQKPGKAPELLIY | AASSLQS | GVPSRFSGSGSGTDFTLTISSLQPEDFATYYC | QQAGI | FGQGTKLEIK | RTVAAPS |
| H11 | | | | | | | | |

Cycle 1 Fab Inhibitor Sequences-Heavy Chain Variable Region (Clones are in same order as provided above for the light chain sequences)

| HV-FR1 | HV-CDR1 | HV-FR2 | HV-CDR2 | HV-FR3 | HV-CDR3 | HV-FR4 |
|---|---|---|---|---|---|---|
| EVQLLESGGGLVQPGGSLRLSCAASGFTFS | QYWMG | WVRQAPGKGLEWVS | SISPSGGMTMYADSVKG | RFTISRDNSKNTLYLQMNSLRAEDTAVYYCAK | DIRGAYSSGLFDY | WGRGTLVTVSS |
| EVQLLESGGGLVQPGGSLRLSCAASGFTFS | DYGMA | WVRQAPGKGLEWVS | SISPSGGWTLYADSVKG | RFTISRDNSKNTLYLQMNSLRAEDTAVYYCAK | DIRGAYSSGLFDY | WGRGTLVTVSS |
| EVQLLESGGGLVQPGGSLRLSCAASGFTFS | WYWMG | WVRQAPGKGLEWVS | SISPSGGYTFYADSVKG | RFTISRDNSKNTLYLQMNSLRAEDTAVYYCAK | DIRGAYSSGLFDY | WGRGTLVTVSS |
| EVQLLESGGGLVQPGGSLRLSCAASGFTFS | PYWMH | WVRQAPGKGLEWVS | GIGPSGGLTFYADSVKG | RFTISRDNSKNTLYLQMNSLRAEDTAVYYCAK | DIRGAYSSGLFDY | WGRGTLVTVSS |
| EVQLLESGGGLVQPGGSLRLSCAASGFTFS | PYWMS | WVRQAPGKGLEWVS | GISPSGGITFYADSVKG | RFTISRDNSKNTLYLQMNSLRAEDTAVYYCAK | DIRGAYSSGLFDY | WGRGTLVTVSS |
| EVQLLESGGGLVQPGGSLRLSCAASGFTFS | WYWMV | WVRQAPGKGLEWVS | SIGPSGGDTYYADSVKG | RFTISRDNSKNTLYLQMNSLRAEDTAVYYCAK | DIRGAYSSGLFDY | WGRGTLVTVSS |
| EVQLLESGGGLVQPGGSLRLSCAASGFTFS | WYNMH | WVRQAPGKGLEWVS | GISPSGGNTMYADSVKG | RFTISRDNSKNTLYLQMNSLRAEDTAVYYCAK | DIRGAYSSGLFDY | WGRGTLVTVSS |
| EVQLLESGGGLVQPGGSLRLSCAASGFTFS | WYGMG | WVRQAPGKGLEWVS | VIVSSGGFTQYADSVKG | RFTISRDNSKNTLYLQMNSLRAEDTAVYYCAK | DIRGAYSSGLFDY | WGRGTLVTVSS |
| EVQLLESGGGLVQPGGSLRLSCAASGFTFS | YYGMG | WVRQAPGKGLEWVS | VISSSGGFTFYADSVKG | RFTISRDNSKNTLYLQMNSLRAEDTAVYYCAK | DIRGAYSSGLFDY | WGRGTLVTVSS |
| EVQLLESGGGLVQPGGSLRLSCAASGFTFS | QYWMS | WVRQAPGKGLEWVS | SISPSGGETFYADSVKG | RFTISRDNSKNTLYLQMNSLRAEDTAVYYCAK | DIRGAYSSGLFDY | WGRGTLVTVSS |
| EVQLLESGGGLVQPGGSLRLSCAASGFTFS | WYWMH | WVRQAPGKGLEWVS | GIVSSGGTTIYADSVKG | RFTISRDNSKNTLYLQMNSLRAEDTAVYYCAK | DIRGAYSSGLFDY | WGRGTLVTVSS |
| EVQLLESGGGLVQPGGSLRLSCAASGFTFS | RYNMH | WVRQAPGKGLEWVS | GIVPSGGTTHYADSVKG | RFTISRDNSKNTLYLQMNSLRAEDTAVYYCAK | DIRGAYSSGLFDY | WGRGTLVTVSS |
| EVQLLESGGGLVQPGGSLRLSCAASGFTFS | VYGMS | WVRQAPGKGLEWVS | RIVPSGGRTGYADSVKG | RFTISRDNSKNTLYLQMNSLRAEDTAVYYCAK | DIRGAYSSGLFDY | WGRGTLVTVSS |
| EVQLLESGGGLVQPGGSLRLSCAASGFTFS | EYWMA | WVRQAPGKGLEWVS | SISPSGGHTFYADSVKG | RFTISRDNSKNTLYLQMNSLRAEDTAVYYCAK | DIRGAYSSGLFDY | WGRGTLVTVSS |
| EVQLLESGGGLVQPGGSLRLSCAASGFTFS | WYNMS | WVRQAPGKGLEWVS | RISPSGGDTGYADSVKG | RFTISRDNSKNTLYLQMNSLRAEDTAVYYCAK | DIRGAYSSGLFDY | WGRGTLVTVSS |
| EVQLLESGGGLVQPGGSLRLSCAASGFTFS | EYWMG | WVRQAPGKGLEWVS | SIYPSGGNTIYADSVKG | RFTISRDNSKNTLYLQMNSLRAEDTAVYYCAK | DIRGAYSSGLFDY | WGRGTLVTVSS |
| EVQLLESGGGLVQPGGSLRLSCAASGFTFS | YYNMS | WVRQAPGKGLEWVS | GISPSGGPTGYADSVKG | RFTISRDNSKNTLYLQMNSLRAEDTAVYYCAK | DIRGAYSSGLFDY | WGRGTLVTVSS |
| EVQLLESGGGLVQPGGSLRLSCAASGFTFS | YYNMH | WVRQAPGKGLEWVS | GIGPSGGGTLYADSVKG | RFTISRDNSKNTLYLQMNSLRAEDTAVYYCAK | DIRGAYSSGLFDY | WGRGTLVTVSS |
| EVQLLESGGGLVQPGGSLRLSCAASGFTFS | LYHMH | WVRQAPGKGLEWVS | GIGPSGGWTIYADSVKG | RFTISRDNSKNTLYLQMNSLRAEDTAVYYCAK | DIRGAYSSGLFDY | WGRGTLVTVSS |
| EVQLLESGGGLVQPGGSLRLSCAASGFTFS | EYNMH | WVRQAPGKGLEWVS | GISPSGGMTHYADSVKG | RFTISRDNSKNTLYLQMNSLRAEDTAVYYCAK | DIRGAYSSGLFDY | WGRGTLVTVSS |
| EVQLLESGGGLVQPGGSLRLSCAASGFTFS | EYWMT | WVRQAPGKGLEWVS | GISPSGGMTFYADSVKG | RFTISRDNSKNTLYLQMNSLRAEDTAVYYCAK | DIRGAYSSGLFDY | WGRGTLVTVSS |
| EVQLLESGGGLVQPGGSLRLSCAASGFTFS | HYWMH | WVRQAPGKGLEWVS | GISPSGGMTMYADSVKG | RFTISRDNSKNTLYLQMNSLRAEDTAVYYCAK | DIRGAYSSGLFDY | WGRGTLVTVSS |
| EVQLLESGGGLVQPGGSLRLSCAASGFTFS | QYNMH | WVRQAPGKGLEWVS | GIGPSGGITIYADSVKG | RFTISRDNSKNTLYLQMNSLRAEDTAVYYCAK | DIRGAYSSGLFDY | WGRGTLVTVSS |
| EVQLLESGGGLVQPGGSLRLSCAASGFTFS | PYWMH | WVRQAPGKGLEWVS | GISSSGGDTLYADSVKG | RFTISRDNSKNTLYLQMNSLRAEDTAVYYCAK | DIRGAYSSGLFDY | WGRGTLVTVSS |
| EVQLLESGGGLVQPGGSLRLSCAASGFTFS | PYWMH | WVRQAPGKGLEWVS | GIGPSGGPTFYADSIKG | RFTISRDNSKNTLYLQMNSLRAEDTAVYYCAK | DIRGAYSSGLFDY | WGRGTLVTVSS |
| EVQLLESGGGLVQPGGSLRLSCAASGFTFS | AYGMS | WVRQAPGKGLEWVS | RISPSGGITGYADSVKG | RFTISRDNSKNTLYLQMNSLRAEDTAVYYCAK | DIRGAYSSGLFDY | WGRGTLVTVSS |
| EVQLLESGGGLVQPGGSLRLSCAASGFTFS | WYYMG | WVRQAPGKGLEWVS | SISPSGGWTRYADSVKG | RFTISRDNSKNTLYLQMNSLRAEDTAVYYCAK | DIRGAYSSGLFDY | WGRGTLVTVSS |
| EVQLLESGGGLVQPGGSLRLSCAASGFTFS | FYWMD | WVRQAPGKGLEWVS | SISPSGGTTIYADSVKG | RFTISRDNSKNTLYLQMNSLRAEDTAVYYCAK | DIRGAYSSGLFDY | WGRGTLVTVSS |
| EVQLLESGGGLVQPGGSLRLSCAASGFTFS | DYNMH | WVRQAPGKGLEWVS | YIGPSGGYTHYADSVKG | RFTISRDNSKNTLYLQMNSLRAEDTAVYYCAK | DIRGAYSSGLFDY | WGRGTLVTVSS |
| EVQLLESGGGLVQPGGSLRLSCAASGFTFS | WYWMV | WVRQAPGKGLEWVS | SIVPSGGFTIYADSVKG | RFTISRDNSKNTLYLQMNSLRAEDTAVYYCAK | DIRGAYSSGLFDY | WGRGTLVTVSS |
| EVQLLESGGGLVQPGGSLRLSCAASGFTFS | RYMMH | WVRQAPGKGLEWVS | YISSSGGTTIYADSVKG | RFTISRDNSKNTLYLQMNSLRAEDTAVYYCAK | DIRGAYSSGLFDY | WGRGTLVTVSS |
| EVQLLESGGGLVQPGGSLRLSCAASGFTFS | HYWMQ | WVRQAPGKGLEWVS | GIVPSGGLTMYADSVKG | RFTISRDNSKNTLYLQMNSLRAEDTAVYYCAK | DIRGAYSSGLFDY | WGRGTLVTVSS |
| EVQLLESGGGLVQPGGSLRLSCAASGFTFS | DYNMH | WVRQAPGKGLEWVS | YIGPSGGYTHYADSVKG | RFTISRDNSKNTLYLQMNSLRAEDTAVYYCAK | DIRGAYSSGLFDY | WGRGTLVTVSS |
| EVQLLESGGGLVQPGGSLRLSCAASGFTFS | DYWMA | WVRQAPGKGLEWVS | SIGPSGGFTVYADSVKG | RFTISRDNSKNTLYLQMNSLRAEDTAVYYCAK | DIRGAYSSGLFDY | WGRGTLVTVSS |

| Mutants VH-CDR1 | LV-FR1 | LV-CDR1 | LV-FR2 | LV-CDR2 | LV-FR3 | LV-CDR3 | LV-FR4 | LC |
|---|---|---|---|---|---|---|---|---|
| 539B-M0067-F06-A | QDIQMTQSPSSLSASVGDRVTITC | RANQSIYTYLN | WYQQKPGKAPELLIY | AASSLQS | GVPSRFSGSGSGTDFTLTISSLQPEDFATYYC | QQAGI | FGQGTKLEIK | RTVAAPS |
| 539B-M0067-F06-G | QDIQMTQSPSSLSASVGDRVTITC | RANQSIYTYLN | WYQQKPGKAPELLIY | AASSLQS | GVPSRFSGSGSGTDFTLTISSLQPEDFATYYC | QQAGI | FGQGTKLEIK | RTVAAPS |
| 539B-M0067-F06-V | QDIQMTQSPSSLSASVGDRVTITC | RANQSIYTYLN | WYOQKPGKAPELLIY | AASSLQS | GVPSRFSGSGSGTDFTLTISSLQPEDFATYYC | QQAGI | FGQGTKLEIK | RTVAAPS |

[0467] These heavy chain mutant sequences are In the same order as the light chain desginations provided above

| Mutants Leader | HV-FR1 | HV-CDR1 | HV-FR2 | HV-CDR2 | HV-FR3 | HV-CDR3 | HV-FR4 |
|---|---|---|---|---|---|---|---|
| MKKLLFAIPLVVPFVAQPAMA | EVQLLESGGGLVQPGGSL | WYNMA | WVRQAPGKGLEWVS | RISPSGGDTGYADSVKG | RFTISRDNSKNTLYLQMNSLRAEDTAVYYCAK | DIRGAYSSGLFDY | WGRGTLVTVSS |
| | RLSCAASGFTFS | | | | | | |
| MKKLLFAIPLVVPFVAQPAMA | EVQLLESGGGLVQPGGSL | WYNMG | WVRQAPGKGLEWVS | RISPSGGDTGYADSVKG | RFTISRDNSKNTLYLQMNSLRAEDTAVYYCAK | DIRGAYSSGLFDY | WGRGTLVTVSS |
| | RLSCAASGFTFS | | | | | | |
| MKKLLFAIPLVVPFVAQPAMA | EVQLLESGGGLVQPGGSL | WYNMG | WVRQAPGKGLEWVS | RISPSGGDTGYADSVKG | RFTISRDNSKNTLYLQMNSLRAEDTAVYYCAK | DIRGAYSSGLFDY | WGRGTLVTVSS |
| | RLSCAASGFTFS | | | | | | |

LV-AA
QDIQMTQSPSSLSASVGDRVTITCRANQSIYTYLNWYQQKPGKAPELLIYAASSLQSGVPSRFSGSGSGTDFTLTISSLQPEDFATYYCQQAGIFGQGTKLEIK
QDIQMTQSPSSLSASVGDRVTITCRANQSIYTYLNWYQQKPGKAPELLIYAASSLQSGVPSRFSGSGSGTDFTLTISSLQPEDFATYYCQQAGIFGQGTKLEIK
QDIQMTQSPSSLSASVGDRVTITCRANQSIYTYLNWYQQKPGKAPELLIYAASSLQSGVPSRFSGSGSGTDFTLTISSLQPEDFATYYCQQAGIFGQGTKLEIK
QDIQMTQSPSSLSASVGDRVTITCRANQSIYTYLNWYQQKPGKAPELLIYAASSLQSGVPSRFSGSGSGTDFTLTISSLQPEDFATYYCQQAGIFGQGTKLEIK
QDIQMTQSPSSLSASVGDRVTITCRANQSIYTYLNWYQQKPGKAPELLIYAASSLQSGVPSRFSGSGSGTDFTLTISSLQPEDFATYYCQQAGIFGQGTKLEIK
QDIQMTQSPSSLSASVGDRVTITCRANQSIYTYLNWYQQKPGKAPELLIYAASSLQSGVPSRFSGSGSGTDFTLTISSLQPEDFATYYCQQAGIFGQGTKLEIK
QDIQMTQSPSSLSASVGDRVTITCRANQSIYTYLNWYQQKPGKAPELLIYAASSLQSGVPSRFSGSGSGTDFTLTISSLQPEDFATYYCQQAGIFGQGTKLEIK
QDIQMTQSPSSLSASVGDRVTITCRANQSIYTYLNWYQQKPGKAPELLIYAASSLQSGVPSRFSGSGSGTDFTLTISSLQPEDFATYYCQQAGIFGQGTKLEIK
QDIQMTQSPSSLSASVGDRVTITCRANQSIYTYLNWYQQKPGKAPELLIYAASSLQSGVPSRFSGSGSGTDFTLTISSLQPEDFATYYCQQAGIFGQGTKLEIK
QDIQMTQSPSSLSASVGDRVTITCRANQSIYTYLNWYQQKPGKAPELLIYAASSLQSGVPSRFSGSGSGTDFTLTISSLQPEDFATYYCQQAGIFGQGTKLEIK
QDIQMTQSPSSLSASVGDRVTITCRANQSIYTYLNWYQQKPGKAPELLIYAASSLQSGVPSRFSGSGSGTDFTLTISSLQPEDFATYYCQQAGIFGQGTKLEIK
QDIQMTQSPSSLSASVGDRVTITCRANQSIYTYLNWYQQKPGKAPELLIYAASSLQSGVPSRFSGSGSGTDFTLTISSLQPEDFATYYCQQAGIFGQGTKLEIK
QDIQMTQSPSSLSASVGDRVTITCRANQSIYTYLNWYQQKPGKAPELLIYAASSLQSGVPSRFSGSGSGTDFTLTISSLQPEDFATYYCQQAGIFGQGTKLEIK
QDIQMTQSPSSLSASVGDRVTITCRANQSIYTYLNWYQQKPGKAPELLIYAASSLQSGVPSRFSGSGSGTDFTLTISSLQPEDFATYYCQQAGIFGQGTKLEIK
QDIQMTQSPSSLSASVGDRVTITCRANQSIYTYLNWYQQKPGKAPELLIYAASSLQSGVPSRFSGSGSGTDFTLTISSLQPEDFATYYCQQAGIFGQGTKLEIK
QDIQMTQSPSSLSASVGDRVTITCRANQSIYTYLNWYQQKPGKAPELLIYAASSLQSGVPSRFSGSGSGTDFTLTISSLQPEDFATYYCQQAGIFGQGTKLEIK
QDIQMTQSPSSLSASVGDRVTITCRANQSIYTYLNWYQQKPGKAPELLIYAASSLQSGVPSRFSGSGSGTDFTLTISSLQPEDFATYYCQQAGIFGQGTKLEIK
QDIQMTQSPSSLSASVGDRVTITCRANQSIYTYLNWYQQKPGKAPELLIYAASSLQSGVPSRFSGSGSGTDFTLTISSLQPEDFATYYCQQAGIFGQGTKLEIK
QDIQMTQSPSSLSASVGDRVTITCRANQSIYTYLNWYQQKPGKAPELLIYAASSLQSGVPSRFSGSGSGTDFTLTISSLQPEDFATYYCQQAGIFGQGTKLEIK
QDIQMTQSPSSLSASVGDRVTITCRANQSIYTYLNWYQQKPGKAPELLIYAASSLQSGVPSRFSGSGSGTDFTLTISSLQPEDFATYYCQQAGIFGQGTKLEIK
QDIQMTQSPSSLSASVGDRVTITCRANQSIYTYLNWYQQKPGKAPELLIYAASSLQSGVPSRFSGSGSGTDFTLTISSLQPEDFATYYCQQAGIFGQGTKLEIK
QDIQMTQSPSSLSASVGDRVTITCRANQSIYTYLNWYQQKPGKAPELLIYAASSLQSGVPSRFSGSGSGTDFTLTISSLQPEDFATYYCQQAGIFGQGTKLEIK
QDIQMTQSPSSLSASVGDRVTITCRANQSIYTYLNWYQQKPGKAPELLIYAASSLQSGVPSRFSGSGSGTDFTLTISSLQPEDFATYYCQQAGIFGQGTKLEIK
QDIQMTQSPSSLSASVGDRVTITCRANQSIYTYLNWYQQKPGKAPELLIYAASSLQSGVPSRFSGSGSGTDFTLTISSLQPEDFATYYCQQAGIFGQGTKLEIK
QDIQMTQSPSSLSASVGDRVTITCRANQSIYTYLNWYQQKPGKAPELLIYAASSLQSGVPSRFSGSGSGTDFTLTISSLQPEDFATYYCQQAGIFGQGTKLEIK
QDIQMTQSPSSLSASVGDRVTITCRANQSIYTYLNWYQQKPGKAPELLIYAASSLQSGVPSRFSGSGSGTDFTLTISSLQPEDFATYYCQQAGIFGQGTKLEIK
QDIQMTQSPSSLSASVGDRVTITCRANQSIYTYLNWYQQKPGKAPELLIYAASSLQSGVPSRFSGSGSGTDFTLTISSLQPEDFATYYCQQAGIFGQGTKLEIK
QDIQMTQSPSSLSASVGDRVTITCRANQSIYTYLNWYQQKPGKAPELLIYAASSLQSGVPSRFSGSGSGTDFTLTISSLQPEDFATYYCQQAGIFGQGTKLEIK
QDIQMTQSPSSLSASVGDRVTITCRASQSISSYLNWYQQKPGKAPKLLIYAASSLQSGVPSRFSGSGSGTDFTLTISSLQPEDFATYYCQQSYSTPRTFGQGTKVEIK
QDIQMTQSPSSLSASVGDRVTITCRANQSIYTYLNWYQQKPGKAPELLIYAASSLQSGVPSRFSGSGSGTDFTLTISSLQPEDFATYYCQQAGIFGQGTKLEIK
QDIQMTQSPSSLSASVGDRVTITCRANQSIYTYLNWYQQKPGKAPELLIYAASSLQSGVPSRFSGSGSGTDFTLTISSLQPEDFATYYCQQAGIFGQGTKLEIK
QDIQMTQSPSSLSASVGDRVTITCRANQSIYTYLNWYQQKPGKAPELLIYAASSLQSGVPSRFSGSGSGTDFTLTISSLQPEDFATYYCQQAGIFGQGTKLEIK
QDIQMTqSPGTLSLSPGERATMSCRASQSFTGSYLAWYQQKPGLAPRLLIYDASSRAAGIPDRFSGSGSGTDFTLTISRLEPEDFAVYYCQQYGTSPPWAFGOGTKVEIK
QDIQMTQSPSSLSASVGDRVTITCRANQSIYTYLNWYQQKPGKAPELLIYAASSLQSGVPSRFSGSGSGTDFTLTISSLQPEDFATYYCQQAGIFGQGTKLEIK
HV-AA
EVQLLESGGGLVQPGGSLRLSCAASGFTFSQYWMGWVRQAPGKGLEWVSSISPSGGMTMYADSVKGRFTISRDNSKNTLYLQMNSLRAEDTAVYYCAKDIRGAYSSGLFDYWGRGTLVTVSS
EVQLLESGGGLVQPGGSLRLSCAASGFTFSDYGMAWVRQAPGKGLEWVSSISPSGGWTLYADSVKGRFTISRDNSKNTLYLQMNSLRAEDTAVYYCAKDIRGAYSSGLFDYWGRGTLVTVSS
EVQLLESGGGLVQPGGSLRLSCAASGFTFSWYWMGWVRQAPGKGLEWVSSISPSGGYTFYADSVKGRFTISRDNSKNTLYLQMNSLRAEDTAVYYCAKDIRGAYSSGLFDYWGRGTLVTVSS
EVQLLESGGGLVQPGGSLRLSCAASGFTFSPYWMHWVRQAPGKGLEWVSGIGPSGGLTFYADSVKGRFTISRDNSKNTLYLQMNSLRAEDTAVYYCAKDIRGAYSSGLFDYWGRGTLVTVSS
EVQLLESGGGLVQPGGSLRLSCAASGFTFSPYWMSWVRQAPGKGLEWVSGISPSGGITFYADSVKGRFTISRDNSKNTLYLQMNSLRAEDTAVYYCAKDIRGAYSSGLFDYWGRGTLVTVSS
EVQLLESGGGLVQPGGSLRLSCAASGFTFSWYWMVWVRQAPGKGLEWVSSIGPSGGDTYYADSVKGRFTISRDNSKNTLYLQMNSLRAEDTAVYYCAKDIRGAYSSGLFDYWGRGTLVTVSS
EVQLLESGGGLVQPGGSLRLSCAASGFTFSWYNMHWVRQAPGKGLEWVSGISPSGGNTMYADSVKGRFTISRDNSKNTLYLQMNSLRAEDTAVYYCAKDIRGAYSSGLFDYWGRGTLVTVSS
EVQLLESGGGLVQPGGSLRLSCAASGFTFSWYGMGWVRQAPGKGLEWVSVIVSSGGFTQYADSVKGRFTISRDNSKNTLYLQMNSLRAEDTAVYYCAKDIRGAYSSGLFDYWGRGTLVTVSS
EVQLLESGGGLVQPGGSLRLSCAASGFTFSYYGMGWVRQAPGKGLEWVSVISSSGGFTFYADSVKGRFTISRDNSKNTLYLQMNSLRAEDTAVYYCAKDIRGAYSSGLFDYWGRGTLVTVSS
EVQLLESGGGLVQPGGSLRLSCAASGFTFSQYWMSWVRQAPGKGLEWVSSISPSGGETFYADSVKGRFTISRDNSKNTLYLQMNSLRAEDTAVYYCAKDIRGAYSSGLFDYWGRGTLVTVSS
EVQLLESGGGLVQPGGSLRLSCAASGFTFSWYWMHWVRQAPGKGLEWVSGIVSSGGTTIYADSVKGRFTISRDNSKNTLYLQMNSLRAEDTAVYYCAKDIRGAYSSGLFDYWGRGTLVTVSS
EVQLLESGGGLVQPGGSLRLSCAASGFTFSRYNMHWVRQAPGKGLEWVSGIVPSGGTTHYADSVKGRFTISRDNSKNTLYLQMNSLRAEDTAVYYCAKDIRGAYSSGLFDYWGRGTLVTVSS
EVQLLESGGGLVQPGGSLRLSCAASGFTFSVYGMSWVRQAPGKGLEWVSRIVPSGGRTGYADSVKGRFTISRDNSKNTLYLQMNSLRAEDTAVYYCAKDIRGAYSSGLFDYWGRGTLVTVSS
EVQLLESGGGLVQPGGSLRLSCAASGFTFSEYWMAWVRQAPGKGLEWVSSISPSGGHTFYADSVKGRFTISRDNSKNTLYLQMNSLRAEDTAVYYCAKDIRGAYSSGLFDYWGRGTLVTVSS
EVQLLESGGGLVQPGGSLRLSCAASGFTFSWYNMSWVRQAPGKGLEWVSRISPSGGDTGYADSVKGRFTISRDNSKNTLYLQMNSLRAEDTAVYYCAKDIRGAYSSGLFDYWGRGTLVTVSS
EVQLLESGGGLVQPGGSLRLSCAASGFTFSEYWMGWVRQAPGKGLEWVSSIYPSGGNTIYADSVKGRFTISRDNSKNTLYLQMNSLRAEDTAVYYCAKDIRGAYSSGLFDYWGRGTLVTVSS
EVQLLESGGGLVQPGGSLRLSCAASGFTFSYYNMSWVRQAPGKGLEWVSGISPSGGPTGYADSVKGRFTISRDNSKNTLYLQMNSLRAEDTAVYYCAKDIRGAYSSGLFDYWGRGTLVTVSS
EVQLLESGGGLVQPGGSLRLSCAASGFTFSYYNMHWVRQAPGKGLEWVSGIGPSGGGTLYADSVKGRFTISRDNSKNTLYLQMNSLRAEDTAVYYCAKDIRGAYSSGLFDYWGRGTLVTVSS
EVQLLESGGGLVQPGGSLRLSCAASGFTFSLYHMHWVRQAPGKGLEWVSGIGPSGGWTIYADSVKGRFTISRDNSKNTLYLQMNSLRAEDTAVYYCAKDIRGAYSSGLFDYWGRGTLVTVSS
EVQLLESGGGLVQPGGSLRLSCAASGFTFSEYNMHWVRQAPGKGLEWVSGISPSGGMTHYADSVKGRFTISRDNSKNTLYLQMNSLRAEDTAVYYCAKDIRGAYSSGLFDYWGRGTLVTVSS
EVQLLESGGGLVQPGGSLRLSCAASGFTFSEYWMTWVRQAPGKGLEWVSGISPSGGMTFYADSVKGRFTISRDNSKNTLYLQMNSLRAEDTAVYYCAKDIRGAYSSGLFDYWGRGTLVTVSS
EVQLLESGGGLVQPGGSLRLSCAASGFTFSHYWMHWVRQAPGKGLEWVSGISPSGGMTMYADSVKGRFTISRDNSKNTLYLQMNSLRAEDTAVYYCAKDIRGAYSSGLFDYWGRGTLVTVSS
EVQLLESGGGLVQPGGSLRLSCAASGFTFSQYNMHWVRQAPGKGLEWVSGIGPSGGITIYADSVKGRFTISRDNSKNTLYLQMNSLRAEDTAVYYCAKDIRGAYSSGLFDYWGRGTLVTVSS
EVQLLESGGGLVQPGGSLRLSCAASGFTFSPYWMHWVRQAPGKGLEWVSGISSSGGDTLYADSVKGRFTISRDNSKNTLYLQMNSLRAEDTAVYYCAKDIRGAYSSGLFDYWGRGTLVTVSS
EVQLLESGGGLVQPGGSLRLSCAASGFTFSPYWMHWVRQAPGKGLEWVSGIGPSGGPTFYADSIKGRFTISRDNSKNTLYLQMNSLRAEDTAVYYCAKDIRGAYSSGLFDYWGRGTLVTVSS
EVQLLESGGGLVQPGGSLRLSCAASGFTFSAYGMSWVRQAPGKGLEWVSRISPSGGITGYADSVKGRFTISRDNSKNTLYLQMNSLRAEDTAVYYCAKDIRGAYSSGLFDYWGRGTLVTVSS
EVQLLESGGGLVQPGGSLRLSCAASGFTFSWYYMGWVRQAPGKGLEWVSSISPSGGWTRYADSVKGRFTISRDNSKNTLYLQMNSLRAEDTAVYYCAKDIRGAYSSGLFDYWGRGTLVTVSS
EVQLLESGGGLVQPGGSLRLSCAASGFTFSFYWMDWVRQAPGKGLEWVSSISPSGGTTIYADSVKGRFTISRDNSKNTLYLQMNSLRAEDTAVYYCAKDIRGAYSSGLFDYWGRGTLVTVSS
EVQLLESGGGLVQPGGSLRLSCAASGFTFSDYNMHWVRQAPGKGLEWVSYIGPSGGYTHYADSVKGRFTISRDNSKNTLYLQMNSLRAEDTAVYYCAKDIRGAYSSGLFDYWGRGTLVTVSS
EVQLLESGGGLVQPGGSLRLSCAASGFTFSWYWMVWVRQAPGKGLEWVSSIVPSGGFTIYADSVKGRFTISRDNSKNTLYLQMNSLRAEDTAVYYCAKDIRGAYSSGLFDYWGRGTLVTVSS
EVQLLESGGGLVQPGGSLRLSCAASGFTFSRYMMHWVRQAPGKGLEWVSYISSSGGTTIYADSVKGRFTISRDNSKNTLYLQMNSLRAEDTAVYYCAKDIRGAYSSGLFDYWGRGTLVTVSS
EVQLLESGGGLVQPGGSLRLSCAASGFTFSHYWMQWVRQAPGKGLEWVSGIVPSGGLTMYADSVKGRFTISRDNSKNTLYLQMNSLRAEDTAVYYCAKDIRGAYSSGLFDYWGRGTLVTVSS
EVQLLESGGGLVQPGGSLRLSCAASGFTFSDYNMHWVRQAPGKGLEWVSYIGPSGGYTHYADSVKGRFTISRDNSKNTLYLQMNSLRAEDTAVYYCAKDIRGAYSSGLFDYWGRGTLVTVSS
EVQLLESGGGLVQPGGSLRLSCAASGFTFSDYWMAWVRQAPGKGLEWVSSIGPSGGFTVYADSVKGRFTISRDNSKNTLYLQMNSLRAEDTAVYYCAKDIRGAYSSGLFDYWGRGTLVTVSS

[0468] Cycle 2 Inhibitors-Light Chain Variable Region Sequences

| Initial Name | LV-FR1 | LV-CDR1 | LV-FR2 | LV-CDR2 | LV-FR3 | LV-CDR3 | LV-FR4 |
|---|---|---|---|---|---|---|---|
| 539B-M0105-C05 | QDIQMTQSPSSLSASVGDRVTITC | RANQSIYTYLN | WYQQKPGKAPELLIY | AASSLQS | GVPSRFSGSGSGTDFTLTISSLQPEDFATYYC | QQAGI | FGQGTKLEIK |
| 539B-M0105-E11 | QDIQMTQSPSSLSASVGDRVTITC | RANQSIYTYLN | WYQQKPGKAPELLIY | AASSLQS | GVPSRFSGSGSGTDFTLTISSLQPEDFATYYC | QQAGI | FGQGTKLEIK |
| 539B-M0105-F08 | QDIQMTQSPSSLSASVGDRVTITC | RANQSIYTYLN | WYQQKPGKAPELLIY | AASSLQS | GVPSRFSGSGSGTDFTLTISSLQPEDFATYYC | QQAGI | FGQGTKLEIK |
| 539B-M0107-A12 | QDIQMTQSPSSLSASVGDRVTITC | RANQSIYTYLN | WYQQKPGKAPELLIY | AASSLQS | GVPSRFSGSGSGTDFTLTISSLQPEDFATYYC | QQAGI | FGQGTKLEIK |
| 539B-M0108-A02 | QDIQMTQSPSSLSASVGDRVTITC | RANQSIYTYLN | WYQQKPGKAPELLIY | AASSLQS | GVPSRFSGSGSGTDFTLTISSLQPEDFATYYC | QQAGI | FGQGTKLEIK |
| 539B-M0109-G11 | QDIQMTQSPSSLSASVGDRVTITC | RANQSIYTYLN | WYQQKPGKAPELLIY | AASSLQS | GVPSRFSGSGSGTDFTLTISSLQPEDFATYYC | QQAGI | FGQGTKLEIK |
| 539B-M0110-G05 | QDIQMTQSPSSLSASVGDRVTITC | RANQSIYTYLN | WYQQKPGKAPELLIY | AASSLQS | GVPSRFSGSGSGTDFTLTISSLQPEDFATYYC | QQAGI | FGQGTKLEIK |
| 539B-M0129-B11 | QDIQMTQSPSSLSASVGDRVTITC | RANQSIYTYLN | WYQQKPGKAPELLIY | AASSLQS | GVPSRFSGSGSGTDFTLTISSLQPEDFATYYC | QQAGI | FGQGTKLEIK |
| 539B-M0130-A01 | QDIQMTQSPSSLSASVGDRVTITC | RANQSIYTYLN | WYQQKPGKAPELLIY | AASSLQS | GVPSRFSGSGSGTDFTLTISSLQPEDFATYYC | QQAGI | FGQGTKLEIK |
| 539B-M0130-C12 | QDIQMTQSPSSLSASVGDRVTITC | RANQSIYTYLN | WYQQKPGKAPELLIY | AASSLQS | GVPSRFSGSGSGTDFTLTISSLQPEDFATYYC | QQAGI | FGQGTKLEIK |
| 539B-M0130-F06 | QDIQMTQSPSSLSASVGDRVTITC | RANQSIYTYLN | WYQQKPGKAPELLIY | AASSLQS | GVPSRFSGSGSGTDFTLTISSLQPEDFATYYC | QQAGI | FGQGTKLEIK |
| 539B-M0130-H04 | QDIQMTQSPSSLSASVGDRVTITC | RANQSIYTYLN | WYQQKPGKAPELLIY | AASSLQS | GVPSRFSGSGSGTDFTLTISSLQPEDFATYYC | QQAGI | FGQGTKLEIK |
| 539B-M0131-A06 | QDIQMTQSPSSLSASVGDRVTITC | RANQSIYTYLN | WYQQKPGKAPELLIY | AASSLQS | GVPSRFSGSGSGTDFTLTISSLQPEDFATYYC | QQAGI | FGQGTKLEIK |
| 539B-M0131-D03 | QDIQMTQSPSSLSASVGDRVTITC | RANQSIYTYLN | WYQQKPGKAPELLIY | AASSLQS | GVPSRFSGSGSGTDFTLTISSLQPEDFATYYC | QQAGI | FGQGTKLEIK |
| 539B-M0132-A04 | QDIQMTQSPSSLSASVGDRVTITC | RANQSIYTYLN | WYQQKPGKAPELLIY | AASSLQS | GVPSRFSGSGSGTDFTLTISSLQPEDFATYYC | QQAGI | FGQGTKLEIK |
| 539B-M0133-B08 | QDIQMTQSPSSLSASVGDRVTITC | RANQSIYTYLN | WYQQKPGKAPELLIY | AASSLQS | GVPSRFSGSGSGTDFTLTISSLQPEDFATYYC | QQAGI | FGQGTKLEIK |
| 539B-M0133-E05 | QDIQMTQSPSSLSASVGDRVTITC | RANQSIYTYLN | WYQQKPGKAPELLIY | AASSLQS | GVPSRFSGSGSGTDFTLTISSLQPEDFATYYC | QQAGI | FGQGTKLEIK |
| 539B-M0121-E07 | QDIQMTQSPSSLSASVGDRVTITC | RANQSIYTYLN | WYQQKPGKAPELLIY | AASSLQS | GVPSRFSGSGSGTDFTLTISSLQPEDFATYYC | QQAGI | FGQGTKLEIK |
| 539B-M0118-F11 | QDIQMTQSPSSLSASVGDRVTITC | RANQSIYTYLN | WYQQKPGKAPELLIY | AASSLQS | GVPSRFSGSGSGTDFTLTISSLQPEDFATYYC | QQAGI | FGQGTKLEIK |
| 539B-M0125-G07 | QDIQMTQSPSSLSASVGDRVTITC | RANQSIYTYLN | WYQQKPGKAPELLIY | AASSLQS | GVPSRFSGSGSGTDFTLTISSLQPEDFATYYC | QQAGI | FGQGTKLEIK |
| 539B-M0124-E07 | QDIQMTQSPSSLSASVGDRVTITC | RANQSIYTYLN | WYQQKPGKAPELLIY | AASSLQS | GVPSRFSGSGSGTDFTLTISSLQPEDFATYYC | QQAGI | FGQGTKLEIK |
| 539B-M0119D01- | QDIQMTQSPSSLSASVGDRVTITC | RANQSIYTYLN | WYQQKPGKAPELLIY | AASSLQS | GVPSRFSGSGSGTDFTLTISSLQPEDFATYYC | QQAGI | FGQGTKLEIK |
| 539B-M0119-A02 | QDIQMTQSPSSLSASVGDRVTITC | RANQSIYTYLN | WYQQKPGKAPELLIY | AASSLQS | GVPSRFSGSGSGTDFTLTISSLQPEDFATYYC | QQAGI | FGQGTKLEIK |
| 539B-M0122-C06 | QDIQMTQSPSSLSASVGDRVTITC | RANQSIYTYLN | WYQQKPGKAPELLIY | AASSLQS | GVPSRFSGSGSGTDFTLTISSLQPEDFATYYC | QQAGI | FGQGTKLEIK |
| 539B-M0123-G07 | QDIQMTQSPSSLSASVGDRVTITC | RANQSIYTYLN | WYQQKPGKAPELLIY | AASSLQS | GVPSRFSGSGSGTDFTLTISSLQPEDFATYYC | QQAGI | FGQGTKLEIK |

[0469] Cycle 2 Inhibitors-Heavy Chain Variable Sequences (These are in the same order as the Cycle 2 Light Chain Inhibitors provided above)

| HV-FR1 | HV-CDR1 | HV-FR2 | HV-CDR2 | HV-FR3 | HV-CDR3 | HV-FR4 |
|---|---|---|---|---|---|---|
| EVQLLESGGGLVQPGGSLRLSCAASGFTFS | PYWMH | WVRQAPGKGLEWVS | GISSSGGDTLYADSVKG | RFTISRDNSKNTLYLQMNGLRAEDTAVYYCAR | DIRGAYSSGLFFS | WGRGTLVTVSS |
| EVQLLESGGGLVQPGGSLRLSCAASGFTFS | QYFMH | WVRQAPGKGLEWVS | GIYPSGGDTFYADSVKG | RFTISRDNSKNTLYLQMNSLRAEDTAVYYCAR | DIRGAYSSGVFDY | WGRGTLVTVSS |
| EVQLLESGGGLVQPGGSLRLSCAASGFTFS | PYWMH | WVRQAPGKGLEWVS | GISSSGGDTLYADSVKG | RFTISRDNSKNTLYLQMNGLRAEDTAVYYCAR | DIRGAYSSGLFFS | WGRGTLVTVSS |
| EVQLLESGGGLVQPGGSLRLSCAASGFTFS | DYNMH | WVRQAPGKGLEWVS | YIGPSGGYTHYADSVKG | RFTISRDNSKNTLYLQMNSLRAEDTAVYYCAR | DIRGAYASGLFDY | WGRGTLVTVSS |
| EVQLLESGGGLVQPGGSLRLSCAASGFTFS | WYWMH | WVRQAPGKGLEWVS | GIYSSGGDTIYADSVKG | RFTISRDNSKNTLYLQMNSLRAEDTAVYYCAK | DIRGPHSSGLFDY | WGRGTLVTVSS |
| EVQLLESGGGLVQPGGSLRLSCAASGFTFS | EYNMH | WVRQAPGKGLEWVS | GIVPSGGLTHYADSVKG | RFTISRDNSKNTLYLQMNSLRAEDTAVYYCAK | DIRGAYSSGLFDY | WGRGTLVTVSS |
| EVQLLESGGGLVQPGGSLRLSCAASGFTFS | EYNMH | WVRQAPGKGLEWVS | GIGPSGGPTMYADSVKG | RFTISRDNSKNTLYLQMNSLRAEDTAVYYCAK | DIRGAYSGGLFDY | WGRGTLVTVSS |
| EVQLLESGGGLVQPGGSLRLSCAASGFTFS | PYWMH | WVRQAPGKGLEWVS | GIGPSGGPTFYADSVKG | RFTISRDNSKNTLYLQMNSLRAEDTAVYYCAR | DIMGAYASGLFHN | WGRGTLVTVSS |
| EVQLLESGGGLVQPGGSLRLSCAASGFTFS | EYNMH | WVRQAPGKGLEWVS | GIVPSGGLTHYADSVKG | RFTISRDNSKNTLYLQMNSLRAEDTAVYYCAK | DIRGAYSSGLFDH | WGRGTLVTVSS |
| EVQLLESGGGLVQPGGSLRLSCAASGFTFS | EYNMH | WVRQAPGKGLEWVS | GIVPSGGLTHYADSVKG | RFTISRDNSKNTLYLQMNSLRAEDTAVYYCAR | DIRGAYSAGIFDY | WGRGTLVTVSS |
| EVQLLESGGGLVQPGGSLRLSCAASGFTFS | PYWMH | WVRQAPGKGLEWVS | GISPSGGETIYADSVKG | RFTISRDNSKNTLYLQMNSLRAEDTAVYYCAR | DIWGAYSAGHFEY | WGRGTLVTVSS |
| EVQLLESGGGLVQPGGSLRLSCAASGFTFS | PYWMH | WVRQAPGKGLEWVS | GISPSGGHTMYADSVKG | RFTISRDNSKNTLYLQMNSLRAEDTAVYYCAK | DIRGAYSSGLFDF | WGRGTLVTVSS |
| EVQLLESGGGLVQPGGSLRLSCAASGFTFS | WYWMH | WVRQAPGKGLEWVS | GISPSGGMTMYADSVKG | RFTISRDNSKNTLYLQMNSLRAEDTAVYYCAR | DIVGPYSAGLFDY | WGRGTLVTVSS |
| EVQLLESGGGLVQPGGSLRLSCAASGFTFS | WYWMH | WVRQAPGKGLEWVS | GISPSGGYTMYADSVKG | RFTISRDNSKNTLYLQMNSLRAEDTAVYYCAK | DISGAYSSGLFTF | WGRGTLVTVSS |
| EVQLLESGGGLVQPGGSLRLSCAASGFTFS | PYWMH | WVRQAPGKGLEWVS | GISPSGGNTLYADSVKG | RFTISRDNSKNTLYLQMNSLRAEDTAVYYCAR | DIRGAYSSGLFYD | WGRGTLVTVSS |
| EVQLLESGGGLVQPGGSLRLSCAASGFTFS | WYWMH | WVRQAPGKGLEWVS | GISPSGGSTFYADSVKG | RFTISRDNSKNTLYLQMNSLRAEDTAVYYCAR | DFSGAYSAGLFAY | WGRGTLVTVSS |
| EVQLLESGGGLVQPGGSLRLSCAASGFTFS | YYNMH | WVRQAPGKGLEWVS | GIGPSGGGTLYADSVKG | RFTISRDNSKNTLYLQMNSLRAEDTAVYYCAR | DLSGEYASGLFGY | WGRGTLVTVSS |
| EVQLLESGGGLVQPGGSLRLSCAASGFTFS | WYGMH | WVRQAPGKGLEWVS | GIVSSGGETFYADSVKG | RFTISRDNSKNTLYLQMNSLRAEDTAVYYCAK | DIRGVFLSGLFDH | WGRGTLVTVSS |
| EVQLLESGGGLVQPGGSLRLSCAASGFTFS | YYNMH | WVRQAPGKGLEWVS | GISPSGGTTFYADSVKG | RFTISRDNSKNTLYLQMNSLRAEDTAVYYCAR | DITGAYSAGLFDL | WGRGTLVTVSS |
| EVQLLESGGGLVQPGGSLRLSCAASGFTFS | PYNMH | WVRQAPGKGLEWVS | GISPSGGNTMYADSVKG | RFTISRDNSKNTLYLQMNSLRAEDTAVYYCAR | DIWGAYASGLFDY | WGRGTLVTVSS |
| EVQLLESGGGLVQPGGSLRLSCAASGFTFS | PYWMH | WVRQAPGKGLEWVS | GISPSGGWTFYADSVKG | RFTISRDNSKNTLYLQMNSLRAEDTAVYYCAR | DIRGAYSSGMFDF | WGRGTLVTVSS |
| EVQLLESGGGLVQPGGSLRLSCAASGFTFS | PYWMH | WVRQAPGKGLEWVS | GIGPSGGPTFYADSVKG | RFTISRDNSKNTLYLQMNSLRAEDTAVYYCAK | DIRGAYSGGLFDY | WGRGTLVTVSS |
| EVQLLESGGGLVQPGGSLRLSCAASGFTFS | AYWMH | WVRQAPGKGLEWVS | GISPSGGLTFYADSVKG | RFTISRDDSKNTLYLQMNSLGAEATAVYYCAR | DIRGAYSSGHFDY | WGRGTLVTVSS |
| EVQLLESGGGLVQPGGSLRLSCAASGFTFS | WYWMH | WVRQAPGKGLEWVS | GISPSGGPTMYADSVKG | RFTISRDNSKNTLYLQMNSLRAEDTAVYYCAK | DIRGPYSSGLFDY | WGRGTLVTVSS |
| EVQLLESGGGLVQPGGSLRLSCAASGFTFS | PYWMH | WVRQAPGKGLEWVS | GIGPSGGLTFYADSVKG | RFTISRDNSKNTLYLQMNSLRAEDTAVYYCAR | DMRGAYASGLFDY | WGRGTLVTVSS |

[0470] Cycle 2 Variable Light Chain Amino Acid Sequences (These are in the same order as the Cycle 2 Light Chain Sequences)

LV-AA
QDIQMTQSPSSLSASVGDRVTITCRANQSIYTYLNWYQQKPGKAPELLIYAASSLQSGVPSRF
SGSGSGTDFTLTISSLQPEDFATYYCQQAGIFGQGTKLEIK
QDIQMTQSPSSLSASVGDRVTITCRANQSIYTYLNWYQQKPGKAPELLIYAASSLQSGVPSRF
SGSGSGTDFTLTISSLQPEDFATYYCQQAGIFGQGTKLEIK
QDIQMTQSPSSLSASVGDRVTITCRANQSIYTYLNWYQQKPGKAPELLIYAASSLQSGVPSRF
SGSGSGTDFTLTISSLQPEDFATYYCQQAGIFGQGTKLEIK
QDIQMTQSPSSLSASVGDRVTITCRANQSIYTYLNWYQQKPGKAPELLIYAASSLQSGVPSRF
SGSGSGTDFTLTISSLQPEDFATYYCQQAGIFGQGTKLEIK
QDIQMTQSPSSLSASVGDRVTITCRANQSIYTYLNWYQQKPGKAPELLIYAASSLQSGVPSRF
SGSGSGTDFTLTISSLQPEDFATYYCQQAGIFGQGTKLEIK
QDIQMTQSPSSLSASVGDRVTITCRANQSIYTYLNWYQQKPGKAPELLIYAASSLQSGVPSRF
SGSGSGTDFTLTISSLQPEDFATYYCQQAGIFGQGTKLEIK
QDIQMTQSPSSLSASVGDRVTITCRANQSIYTYLNWYQQKPGKAPELLIYAASSLQSGVPSRF
SGSGSGTDFTLTISSLQPEDFATYYCQQAGIFGQGTKLEIK
QDIQMTQSPSSLSASVGDRVTITCRANQSIYTYLNWYQQKPGKAPELLIYAASSLQSGVPSRF
SGSGSGTDFTLTISSLQPEDFATYYCQQAGIFGQGTKLEIK
QDIQMTQSPSSLSASVGDRVTITCRANQSIYTYLNWYQQKPGKAPELLIYAASSLQSGVPSRF
SGSGSGTDFTLTISSLQPEDFATYYCQQAGIFGQGTKLEIK
QDIQMTQSPSSLSASVGDRVTITCRANQSIYTYLNWYQQKPGKAPELLIYAASSLQSGVPSRF
SGSGSGTDFTLTISSLQPEDFATYYCQQAGIFGQGTKLEIK
QDIQMTQSPSSLSASVGDRVTITCRANQSIYTYLNWYQQKPGKAPELLIYAASSLQSGVPSRF
SGSGSGTDFTLTISSLQPEDFATYYCQQAGIFGQGTKLEIK
QDIQMTQSPSSLSASVGDRVTITCRANQSIYTYLNWYQQKPGKAPELLIYAASSLQSGVPSRF
SGSGSGTDFTLTISSLQPEDFATYYCQQAGIFGQGTKLEIK
QDIQMTQSPSSLSASVGDRVTITCRANQSIYTYLNWYQQKPGKAPELLIYAASSLQSGVPSRF
SGSGSGTDFTLTISSLQPEDFATYYCQQAGIFGQGTKLEIK
QDIQMTQSPSSLSASVGDRVTITCRANQSIYTYLNWYQQKPGKAPELLIYAASSLQSGVPSRF
SGSGSGTDFTLTISSLQPEDFATYYCQQAGIFGQGTKLEIK
QDIQMTQSPSSLSASVGDRVTITCRANQSIYTYLNWYQQKPGKAPELLIYAASSLQSGVPSRF
SGSGSGTDFTLTISSLQPEDFATYYCQQAGIFGQGTKLEIK
QDIQMTQSPSSLSASVGDRVTITCRANQSIYTYLNWYQQKPGKAPELLIYAASSLQSGVPSRF
SGSGSGTDFTLTISSLQPEDFATYYCQQAGIFGQGTKLEIK
QDIQMTQSPSSLSASVGDRVTITCRANQSIYTYLNWYQQKPGKAPELLIYAASSLQSGVPSRF
SGSGSGTDFTLTISSLQPEDFATYYCQQAGIFGQGTKLEIK
QDIQMTQSPSSLSASVGDRVTITCRANQSIYTYLNWYQQKPGKAPELLIYAASSLQSGVPSRF
SGSGSGTDFTLTISSLQPEDFATYYCQQAGIFGQGTKLEIK
QDIQMTQSPSSLSASVGDRVTITCRANQSIYTYLNWYQQKPGKAPELLIYAASSLQSGVPSRF
SGSGSGTDFTLTISSLQPEDFATYYCQQAGIFGQGTKLEIK
QDIQMTQSPSSLSASVGDRVTITCRANQSIYTYLNWYQQKPGKAPELLIYAASSLQSGVPSRF
SGSGSGTDFTLTISSLQPEDFATYYCQQAGIFGQGTKLEIK
QDIQMTQSPSSLSASVGDRVTITCRANQSIYTYLNWYQQKPGKAPELLIYAASSLQSGVPSRF
SGSGSGTDFTLTISSLQPEDFATYYCQQAGIFGQGTKLEIK
QDIQMTQSPSSLSASVGDRVTITCRANQSIYTYLNWYQQKPGKAPELLIYAASSLQSGVPSRF
SGSGSGTDFTLTISSLQPEDFATYYCQQAGIFGQGTKLEIK
QDIQMTQSPSSLSASVGDRVTITCRANQSIYTYLNWYQQKPGKAPELLIYAASSLQSGVPSRF
SGSGSGTDFTLTISSLQPEDFATYYCQQAGIFGQGTKLEIK
QDIQMTQSPSSLSASVGDRVTITCRANQSIYTYLNWYQQKPGKAPELLIYAASSLQSGVPSRF
SGSGSGTDFTLTISSLQPEDFATYYCQQAGIFGQGTKLEIK

[0471] Variable Heavy Chain Amino Acid Sequences (These are In the same order as the Cycle 2 Light Chain Sequences)

HV-AA
EVQLLESGGGLVQPGGSLRLSCAASGFTFSPYWMHWVRQAPGKGLEWVSGISSSGGDTLYA
DSVKGRFTISRDNSKNTLYLQMNGLRAEDTAVYYCARDIRGAYSSGLFFSWGRGTLVTVSS
EVQLLESGGGLVQPGGSLRLSCAASGFTFSQYFMHWVRQAPGKGLEWVSGIYPSGGDTFYA
DSVKGRFTISRDNSKNTLYLQMNSLRAEDTAVYYCARDIRGAYSSGVFDYWGRGTLVTVSS
EVQLLESGGGLVQPGGSLRLSCAASGFTFSPYWMHWVRQAPGKGLEWVSGISSSGGDTLYA
DSVKGRFTISRDNSKNTLYLQMNGLRAEDTAVYYCARDIRGAYSSGLFFSWGRGTLVTVSS
EVQLLESGGGLVQPGGSLRLSCAASGFTFSDYNMHWVRQAPGKGLEWVSYIGPSGGYTHYA
DSVKGRFTISRDNSKNTLYLQMNSLRAEDTAVYYCARDIRGAYASGLFDYWGRGTLVTVSS
EVQLLESGGGLVQPGGSLRLSCAASGFTFSWYWMHWVRQAPGKGLEWVSGIYSSGGDTIYA
DSVKGRFTISRDNSKNTLYLQMNSLRAEDTAVYYCAKDIRGPHSSGLFDYWGRGTLVTVSS
EVQLLESGGGLVQPGGSLRLSCAASGFTFSEYNMHWVRQAPGKGLEWVSGIVPSGGLTHYA
DSVKGRFTISRDNSKNTLYLQMNSLRAEDTAVYYCAKDIRGAYSSGLFDYWGRGTLVTVSS
EVQLLESGGGLVQPGGSLRLSCAASGFTFSEYNMHWVRQAPGKGLEWVSGIGPSGGPTMYA
DSVKGRFTISRDNSKNTLYLQMNSLRAEDTAVYYCAKDIRGAYSGGLFDYWGRGTLVTVSS
EVQLLESGGGLVQPGGSLRLSCAASGFTFSPYWMHWVRQAPGKGLEWVSGIGPSGGPTFYA
DSVKGRFTISRDNSKNTLYLQMNSLRAEDTAVYYCARDIMGAYASGLFHNWGRGTLVTVSS
EVQLLESGGGLVQPGGSLRLSCAASGFTFSEYNMHWVRQAPGKGLEWVSGIVPSGGLTHYA
DSVRGRFTISRDNSKNTLYLQMNSLRAEDTAVYYCAKDIRGAYSSGLFDHWGRGTLVTVSS
EVQLLESGGGLVQPGGSLRLSCAASGFTFSEYNMHWVRQAPGKGLEWVSGIVPSGGLTHYA
DSVKGRFTISRDNSKNTLYLQMNSLRAEDTAVYYCARDIAGAYSAGIFDYWGRGTLVTVSS
EVQLLESGGGLVQPGGSLRLSCAASGFTFSPYWMHWVRQAPGKGLEWVSGISPSGGETIYA
DSVKGRFTISRDNSKNTLYLQMNSLRAEDTAVYYCARDIWGAYSAGHFEYWGRGTLVTVSS
EVQLLESGGGLVQPGGSLRLSCAASGFTFSPYWMHWVRQAPGKGLEWVSSGISPSGGHTMYA
DSVKGRFTISRDNSKNTLYLQMNSLRAEDTAVYYCAKDIRGAYSSGLFDFWGRGTLVTVSS
EVQLLESGGGLVQPGGSLRLSCAASGFTFSWYWMHWVRQAPGKGLEWVSGISPSGGMTMYA
DSVKGRFTISRDNSKNTLYLQMNSLRAEDTAVYYCARDIVGPYSAGLFDYWGRGTLVTVSS
EVQLLESGGGLVQPGGSLRLSCAASGFTFSWYWMHWVRQAPGKGLEWVSGISPSGGYTMYA
DSVKGRFTISRDNSKNTLYLQMNSLRAEDTAVYYCAKDISGAYSSGLFTFWGRGTLVTVSS
EVQLLESGGGLVQPGGSLRLSCAASGFTFSPYWMHWVRQAPGKGLEWVSGISPSGGNTLYA
DSVKGRFTISRDNSKNTLYLQMNSLRAEDTAVYYCARDIRGAYSSGLFYDWGRGTLVTVSS
EVQLLESGGGLVQPGGSLRLSCAASGFTFSWYWMHWVRQAPGKGLEWVSGISPSGGSTFYA
DSVKGRFTISRDNSKNTLYLQMNSLRAEDTAVYYCARDFSGAYSAGLFAYWGRGTLVTVSS
EVQLLESGGGLVQPGGSLRLSCAASGFTFSYYNMHWVRQAPGKGLEWVSGIGPSGGGTLYA
DSVKGRFTISRDNSKNTLYLQMNSLRAEDTAVYYCARDLSGEYASGLFGYWGRGTLVTVSS
EVQLLESGGGLVQPGGSLRLSCAASGFTFSWYGMHWVRQAPGKGLEWVSGIVSGGETFYA
DSVKGRFTISRDNSKNTLYLQMNSLRAEDTAVYYCAKDIRGVFLSGLFDHWGRGTLVTVSS
EVQLLESGGGLVQPGGSLRLSCAASGFTFSYYNMHWVRQAPGKGLEWVSGISPSGGTTFYA
DSVKGRFTISRDNSKNTLYLQMNSLRAEDTAVYYCARDITGAYSAGLFDLWGRGTLVTVSS
EVQLLESGGGLVQPGGSLRLSCAASGFTFSPYNMHWVRQAPGKGLEWVSGISPSGGNTMYA
DSVKGRFTISRDNSKNTLYLQMNSLRAEDTAVYYCARDIWGAYASGLFDYWGRGTLVTVSS
EVQLLESGGGLVQPGGSLRLSCAASGFTFSPYWMHWVRQAPGKGLEWVSGISPSGGWTFYA
DSVKGRFTISRDNSKNTLYLQMNSLRAEDTAVYYCARDIRGAYSSGMFDFWGRGTLVTVSS
EVQLLESGGGLVQPGGSLRLSCAASGFTFSPYWMHWVRQAPGKGLEWVSGIGPSGGPTFYA
DSVKGRFTISRDNSKNTLYLQMNSLRAEDTAVYYCAKDIRGAYSGGLFDYWGRGTLVTVSS
EVQLLESGGGLVQPGGSLRLSCAASGFTFSAYWMHWVRQAPGKGLEWVSGISPSGGLTFYA
DSVKGRFTISRDDSKNTLYLQMNSLGAEATAVYYCARDIRGAYSSGHFDYWGRGTLVTVSS
EVQLLESGGGLVQPGGSLRLSCAASGFTFSWYWMHWVRQAPGKGLEWVSGISPSGGPTMYA
DSVKGRFTISRDNSKNTLYLQMNSLRAEDTAVYYCAKDIRGPYSSGLFDYWGRGTLVTVSS
EVQLLESGGGLVQPGGSLRLSCAASGFTFSPYWMHWVRQAPGKGLEWVSGIGPSGGLTFYA
DSVKGRFTISRDNSKNTLYLQMNSLRAEDTAVYYCARDMRGAYASGLFDYWGRGTLVTVSS

[0472] Light Chain Variable Region Sequences

| | | | | | | | | |
|---|---|---|---|---|---|---|---|---|
| 539B-M0122- | QDIQMTQSPSSLS | RASQNI | WYQQRPGK | AASNLQT | GVPSRFSGSGSGTDFI | QQAGI | FGQGTKLEIK | RTVAAPS |
| H05_VL + | ASVGDRVTITC | FNYLN | APKLLIY | | FTISSLQPEDIATYYC | | | |
| 539B-M0131- | | | | | | | | |
| A6 VH | | | | | | | | |
| 539B-M0131- | QDIQMTQSPSSL | RADQSI | WYQQKPGK | AASSLQS | GVPSRFSGSGSGTDFT | QQAGI | FGQGTKLEIK | RTVAAPS |
| A06-GA-D-VL | SASVGDRVTITC | YTYLN | APKLLIY | | LTISSLQPEDFATYYC | | | |
| 539B-M0131- | QDIQMTQSPSSL | RAEQSI | WYQQKPGK | AASSLQS | GVPSRFSGSGSGTDFT | QQAGI | FGQGTKLEIK | RTVAAPS |
| A06-GA-E-VL | SASVGDRVTITC | YTYLN | APKLLIY | | LTISSLQPEDFATYYC | | | |
| 539B-M0131- | QDIQMTQSPSSL | RATQSI | WYQQKPGK | AASSLQS | GVPSRFSGSGSGTDFT | QQAGI | FGQGTKLEIK | RTVAAPS |
| A06-GA-T-VL | SASVGDRVTITC | YTYLN | APKLLIY | | LTISSLQPEDFATYYC | | | |
| 539B-M0131- | QDIQMTQSPSSL | RAVQSI | WYQQKPGK | AASSLQS | GVPSRFSGSGSGTDFT | QQAGI | FGQGTKLEIK | RTVAAPS |
| A06-GA-V-VL | SASVGDRVTITC | YTYLN | APKLLIY | | LTISSLQPEDFATYYC | | | |

[0473] Heavy Chain Sequences (in the same order as above)

| | | | | | | |
|---|---|---|---|---|---|---|
| EVQLLESGGGLVQPG | WYWMH | WVRQAPG | GISPSGGMT | RFTISRDNSKNTLYLQ | DIVGPYS | WGRGTL |
| GSLRLSCAASGFTFS | | KGLEWVS | MYADSVKG | MNSLRAEDTAVYYCAR | AGLFDY | VTVSS |
| EVQLLESGGGLVQPG | WYWMH | WVRQAPG | GISPSGGMT | RFTISRDNSKNTLYLQ | DIVGPYS | WGRGTL |
| GSLRLSCAASGFTFS | | KGLEWVS | MYADSVKG | MNSLRAEDTAVYYCAR | AGLFDY | VTVSS |
| EVQLLESGGGLVQPG | WYWMH | WVRQAPG | GISPSGGMT | RFTISRDNSKNTLYLQ | DIVGPYS | WGRGTL |
| GSLRLSCAASGFTFS | | KGLEWVS | MYADSVKG | MNSLRAEDTAVYYCAR | AGLFDY | VTVSS |
| EVQLLESGGGLVQPG | WYWMH | WVRQAPG | GISPSGGMT | RFTISRDNSKNTLYLQ | DIVGPYS | WGRGTL |
| GSLRLSCAASGFTFS | | KGLEWVS | MYADSVKG | MNSLRAEDTAVYYCAR | AGLFDY | VTVSS |
| EVQLLESGGGLVQPG | WYWMH | WVRQAPG | GISPSGGMT | RFTISRDNSKNTLYLQ | DIVGPYS | WGRGTL |
| GSLRLSCAASGFTFS | | KGLEWVS | MYADSVKG | MNSLRAEDTAVYYCAR | AGLFDY | VTVSS |

[0474] Cycle 3 Inhibitors-Light Chains

| Initial Name | LV-FR1 | LV-CDR1 | LV-FR2 | LV-CDR2 | LV-FR3 | LV-CDR3 | LV-FR4 | L-Constant |
|---|---|---|---|---|---|---|---|---|
| 539B-M0134-A02 | QDIQMTQSPSSLSASVGDRVTITC | RANQSIYTYLN | WYQQKPGKAPELLIY | AASSLQS | GVPSRFSGSGSGTDFTLTISSLQPEDFATYYC | QQAGI | FGQGTKLEIK | RTVAAPS |
| 539B-M0134-A05 | QDIQMTQSPSSLSASVGDRVTITC | RANQSIYTYLN | WYQQKPGKAPELLIY | AASSLQS | GVPSRFSGSGSGTDFTLTISSLQPEDFATYYC | QQAGI | FGQGTKLEIK | RTVAAPS |
| 539B-M0134-A07 | QDIQMTQSPSSLSASVGDRVTITC | RANQSIYTYLN | WYQQKPGKAPELLIY | AASSLQS | GVPSRFSGSGSGTDFTLTISSLQPEDFATYYC | QQAGI | FGQGTKLEIK | RTVAAPS |
| 539B-M0134-A09 | QDIQMTQSPSSLSASVGDRVTITC | RANQSIYTYLN | WYQQKPGKAPELLIY | AASSLQS | GVPSRFSGSGSGTDFTLTISSLQPEDFATYYC | QQAGI | FGQGTKLEIK | RTVAAPS |
| 539B-M0134-A10 | QDIQMTQSPSSLSASVGDRVTITC | RANQSIYTYLN | WYQQKPGKAPELLIY | AASSLQS | GVPSRFSGSGSGTDFTLTISSLQPEDFATYYC | QQAGI | FGQGTKLEIK | RTVAAPS |
| 539B-M0134-A11 | QDIQMTQSPSSLSASVGDRVTITC | RANQSIYTYLN | WYQQKPGKAPELLIY | AASSLQS | GVPSRFSGSGSGTDFTLTISSLQPEDFATYYC | QQAGI | FGQGTKLEIK | RTVAAPS |
| 539B-M0134-B01 | QDIQMTQSPSSLSASVGDRVTITC | RANQSIYTYLN | WYQQKPGKAPELLIY | AASSLQS | GVPSRFSGSGSGTDFTLTISSLQPEDFATYYC | QQAGI | FGQGTKLEIK | RTVAAPS |
| 539B-M0134-B04 | QDIQMTQSPSSLSASVGDRVTITC | RANQSIYTYLN | WYQQKPGKAPELLIY | AASSLQS | GVPSRFSGSGSGTDFTLTISSLQPEDFATYYC | QQAGI | FGQGTKLEIK | RTVAAPS |
| 539B-M0134-B08 | QDIQMTQSPSSLSASVGDRVTITC | RANQSIYTYLN | WYQQKPGKAPELLIY | AASSLQS | GVPSRFSGSGSGTDFTLTISSLQPEDFATYYC | QQAGI | FGQGTKLEIK | RTVAAPS |
| 539B-M0134-B11 | QDIQMTQSPSSLSASVGDRVTITC | RANQSIYTYLN | WYQQKPGKAPELLIY | AASSLQS | GVPSRFSGSGSGTDFTLTISSLQPEDFATYYC | QQAGI | FGQGTKLEIK | RTVAAPS |
| 539B-M0134-C01 | QDIQMTQSPSSLSASVGDRVTITC | RANQSIYTYLN | WYQQKPGKAPELLIY | AASSLQS | GVPSRFSGSGSGTDFTLTISSLQPEDFATYYC | QQAGI | FGQGTKLEIK | RTVAAPS |
| 539B-M0134-C02 | QDIQMTQSPSSLSASVGDRVTITC | RANQSIYTYLN | WYQQKPGKAPELLIY | AASSLQS | GVPSRFSGSGSGTDFTLTISSLQPEDFATYYC | QQAGI | FGQGTKLEIK | RTVAAPS |
| 539B-M0134-C06 | QDIQMTQSPSSLSASVGDRVTITC | RANQSIYTYLN | WYQQKPGKAPELLIY | AASSLQS | GVPSRFSGSGSGTDFTLTISSLQPEDFATYYC | QQAGI | FGQGTKLEIK | RTVAAPS |
| 539B-M0134-C09 | QDIQMTQSPSSLSASVGDRVTITC | RANQSIYTYLN | WYQQKPGKAPELLIY | AASSLQS | GVPSRFSGSGSGTDFTLTISSLQPEDFATYYC | QQAGI | FGQGTKLEIK | RTVAAPS |
| 539B-M0134-C10 | QDIQMTQSPSSLSASVGDRVTITC | RANQSIYTYLN | WYQQKPGKAPELLIY | AASSLQS | GVPSRFSGSGSGTDFTLTISSLQPEDFATYYC | QQAGI | FGQGTKLEIK | RTVAAPS |
| 539B-M0134-C11 | QDIQMTQSPSSLSASVGDRVTITC | RANQSIYTYLN | WYQQKPGKAPELLIY | AASSLQS | GVPSRFSGSGSGTDFTLTISSLQPEDFATYYC | QQAGI | FGQGTKLEIK | RTVAAPS |
| 539B-M0134-C12 | QDIQMTQSPSSLSASVGDRVTITC | RANQSIYTYLN | WYQQKPGKAPELLIY | AASSLQS | GVPSRFSGSGSGTDFTLTISSLQPEDFATYYC | QQAGI | FGQGTKLEIK | RTVAAPS |
| 539B-M0134-D02 | QDIQMTQSPSSLSASVGDRVTITC | RANQSIYTYLN | WYQQKPGKAPELLIY | AASSLQS | GVPSRFSGSGSGTDFTLTISSLQPEDFATYYC | QQAGI | FGQGTKLEIK | RTVAAPS |
| 539B-M0134-D03 | QDIQMTQSPSSLSASVGDRVTITC | RANQSIYTYLN | WYQQKPGKAPELLIY | AASSLQS | GVPSRFSGSGSGTDFTLTISSLQPEDFATYYC | QQAGI | FGQGTKLEIK | RTVAAPS |
| 539B-M0134-E04 | QDIQMTQSPSSLSASVGDRVTITC | RANQSIYTYLN | WYQQKPGKAPELLIY | AASSLQS | GVPSRFSGSGSGTDFTLTISSLQPEDFATYYC | QQAGI | FGQGTKLEIK | RTVAAPS |
| 539B-M0134-E07 | QDIQMTQSPSSLSASVGDRVTITC | RANQSIYTYLN | WYQQKPGKAPELLIY | AASSLQS | GVPSRFSGSGSGTDFTLTISSLQPEDFATYYC | QQAGI | FGQGTKLEIK | RTVAAPS |
| 539B-M0134-E08 | QDIQMTQSPSSLSASVGDRVTITC | RANQSIYTYLN | WYQQKPGKAPELLIY | AASSLQS | GVPSRFSGSGSGTDFTLTISSLQPEDFATYYC | QQAGI | FGQGTKLEIK | RTVAAPS |
| 539B-M0134-E11 | QDIQMTQSPSSLSASVGDRVTITC | RANQSIYTYLN | WYQQKPGKAPELLIY | AASSLQS | GVPSRFSGSGSGTDFTLTISSLQPEDFATYYC | QQAGI | FGQGTKLEIK | RTVAAPS |
| 539B-M0134-F01 | QDIQMTQSPSSLSASVGDRVTITC | RANQSIYTYLN | WYQQKPGKAPELLIY | AASSLQS | GVPSRFSGSGSGTDFTLTISSLQPEDFATYYC | QQAGI | FGQGTKLEIK | RTVAAPS |
| 539B-M0134-F05 | QDIQMTQSPSSLSASVGDRVTITC | RANQSIYTYLN | WYQQKPGKAPELLIY | AASSLQS | GVPSRFSGSGSGTDFTLTISSLQPEDFATYYC | QQAGI | FGQGTKLEIK | RTVAAPS |
| 539B-M0134-G02 | QDIQMTQSPSSLSASVGDRVTITC | RANQSIYTYLN | WYQQKPGKAPELLIY | AASSLQS | GVPSRFSGSGSGTDFTLTISSLQPEDFATYYC | QQAGI | FGQGTKLEIK | RTVAAPS |
| 539B-M0134-G04 | QDIQMTQSPSSLSASVGDRVTITC | RANQSIYTYLN | WYQQKPGKAPELLIY | AASSLQS | GVPSRFSGSGSGTDFTLTISSLQPEDFATYYC | QQAGI | FGQGTKLEIK | RTVAAPS |
| 539B-M0134-G07 | QDIQMTQSPSSLSASVGDRVTITC | RANQSIYTYLN | WYQQKPGKAPELLIY | AASSLQS | GVPSRFSGSGSGTDFTLTISSLQPEDFATYYC | QQAGI | FGQGTKLEIK | RTVAAPS |
| 539B-M0135-A03 | QDIQMTQSPSSLSASVGDRVTITC | RANQSIYTYLN | WYQQKPGKAPELLIY | AASSLQS | GVPSRFSGSGSGTDFTLTISSLQPEDFATYYC | QQAGI | FGQGTKLEIK | RTVAAPS |
| 539B-M0135-A05 | QDIQMTQSPSSLSASVGDRVTITC | RANQSIYTYLN | WYQQKPGKAPELLIY | AASSLQS | GVPSRFSGSGSGTDFTLTISSLQPEDFATYYC | QQAGI | FGQGTKLEIK | RTVAAPS |
| 539B-M0135-A06 | QDIQMTQSPSSLSASVGDRVTITC | RANQSIYTYLN | WYQQKPGKAPELLIY | AASSLQS | GVPSRFSGSGSGTDFTLTISSLQPEDFATYYC | QQAGI | FGQGTKLEIK | RTVAAPS |
| 539B-M0135-A07 | QDIQMTQSPSSLSASVGDRVTITC | RANQSIYTYLN | WYQQKPGKAPELLIY | AASSLQS | GVPSRFSGSGSGTDFTLTISSLQPEDFATYYC | QQAGI | FGQGTKLEIK | RTVAAPS |
| 539B-M0135-B02 | QDIQMTQSPSSLSASVGDRVTITC | RANQSIYTYLN | WYQQKPGKAPELLIY | AASSLQS | GVPSRFSGSGSGTDFTLTISSLQPEDFATYYC | QQAGI | FGQGTKLEIK | RTVAAPS |
| 539B-M0135-B08 | QDIQMTQSPSSLSASVGDRVTITC | RANQSIYTYLN | WYQQKPGKAPELLIY | AASSLQS | GVPSRFSGSGSGTDFTLTISSLQPEDFATYYC | QQAGI | FGQGTKLEIK | RTVAAPS |
| 539B-M0135-C01 | QDIQMTQSPSSLSASVGDRVTITC | RANQSIYTYLN | WYQQKPGKAPELLIY | AASSLQS | GVPSRFSGSGSGTDFTLTISSLQPEDFATYYC | QQAGI | FGQGTKLEIK | RTVAAPS |
| 539B-M0135-C11 | QDIQMTQSPSSLSASVGDRVTITC | RANQSIYTYLN | WYQQKPGKAPELLIY | AASSLQS | GVPSRFSGSGSGTDFTLTISSLQPEDFATYYC | QQAGI | FGQGTKLEIK | RTVAAPS |
| 539B-M0135-E03 | QDIQMTQSPSSLSASVGDRVTITC | RANQSIYTYLN | WYQQKPGKAPELLIY | AASSLQS | GVPSRFSGSGSGTDFTLTISSLQPEDFATYYC | QQAGI | FGQGTKLEIK | RTVAAPS |
| 539B-M0135-F03 | QDIQMTQSPSSLSASVGDRVTITC | RANQSIYTYLN | WYQQKPGKAPELLIY | AASSLQS | GVPSRFSGSGSGTDFTLTISSLQPEDFATYYC | QQAGI | FGQGTKLEIK | RTVAAPS |
| 539B-M0135-F11 | QDIQMTQSPSSLSASVGDRVTITC | RANQSIYTYLN | WYQQKPGKAPELLIY | AASSLQS | GVPSRFSGSGSGTDFTLTISSLQPEDFATYYC | QQAGI | FGQGTKLEIK | RTVAAPS |
| 539B-M0135-G02 | QDIQMTQSPSSLSASVGDRVTITC | RANQSIYTYLN | WYQQKPGKAPELLIY | AASSLQS | GVPSRFSGSGSGTDFTLTISSLQPEDFATYYC | QQAGI | FGQGTKLEIK | RTVAAPS |
| 539B-M0135-G03 | QDIQMTQSPSSLSASVGDRVTITC | RANQSIYTYLN | WYQQKPGKAPELLIY | AASSLQS | GVPSRFSGSGSGTDFTLTISSLQPEDFATYYC | QQAGI | FGQGTKLEIK | RTVAAPS |
| 539B-M0135-G07 | QDIQMTQSPSSLSASVGDRVTITC | RANQSIYTYLN | WYQQKPGKAPELLIY | AASSLQS | GVPSRFSGSGSGTDFTLTISSLQPEDFATYYC | QQAGI | FGQGTKLEIK | RTVAAPS |
| 539B-M0135-G11 | QDIQMTQSPSSLSASVGDRVTITC | RANQSIYTYLN | WYQQKPGKAPELLIY | AASSLQS | GVPSRFSGSGSGTDFTLTISSLQPEDFATYYC | QQAGI | FGQGTKLEIK | RTVAAPS |
| 539B-M0135-H03 | QDIQMTQSPSSLSASVGDRVTITC | RANQSIYTYLN | WYQQKPGKAPELLIY | AASSLQS | GVPSRFSGSGSGTDFTLTISSLQPEDFATYYC | QQAGI | FGQGTKLEIK | RTVAAPS |
| 539B-M0135-H10 | QDIQMTQSPSSLSASVGDRVTITC | RANQSIYTYLN | WYQQKPGKAPELLIY | AASSLQS | GVPSRFSGSGSGTDFTLTISSLQPEDFATYYC | QQAGI | FGQGTKLEIK | RTVAAPS |

[0475] Cycle 3 Heavy Chain Variable Regions (in the same order as the light chains provided above)

| | | | | | |
|---|---|---|---|---|---|
| HV-FR1 | HV-CDR1 | HV-FR2 | HV-CDR2 | HV-FR3 | HV-CDR3 |

| | | | | | |
|---|---|---|---|---|---|
| EVQLLESGGGLVQP | PYWMH | WVRQAPGKGLEWVS | GISPSGGETIYADSVKG | RFTISRDNSKNTLYLQMNSLRAEDTAVYYCAR | DIWGAYASGLFDY |
| GGSLRLSCAASGFTFS | | | | | |
| EVQLLESGGGLVQP | WYWMV | WVRQAPGKGLEWVS | SIGPSGGDTYYADSVKG | RFTISRDNSKNTLYLQMNSLRAEDTAVYYCAR | DIRGAYSSGLFYD |
| GGSLRLSCAASGFTFS | | | | | |
| EVQLLESGGGLVQP | EYWMA | WVRQAPGKGLEWVS | SISPSGGHTFYADSVKG | RFTISRDNSKNTLYLQMNSLRAEDTAVYYCAR | DMRGAYASGLFDY |
| GGSLRLSCAASGFTFS | | | | | |
| EVQLLESGGGLVQP | PYWMH | WVRQAPGKGLEWVS | GIGPSGGPTFYADSIKG | RFTISRDNSKNTLYLQMNSLRAEDTAVYYCAR | DIWGAYASGLFDY |
| GGSLRLSCAASGFTFS | | | | | |
| EVQLLESGGGLVQP | PYWMH | WVRQAPGKGLEWVS | GIGPSGGPTFYADSIKG | RFTISRDNSKNTLYLQMNSLRAEDTAVYYCAK | DIRGPYSSGLFDY |
| GGSLRLSCAASGFTFS | | | | | |
| EVQLLESGGGLVQP | WYWMH | WVRQAPGKGLEWVS | GIVSSGGTTIYADSVKG | RFTISRDDSKNTLYLQMNSLGAEATAVYYCAR | DIRGAYSSGHFDY |
| GGSLRLSCAASGFTFS | | | | | |
| EVQLLESGGGLVQP | PYWMH | WVRQAPGKGLEWVS | GISPSGGNTLYADSVKG | RFTISRDNSKNTLYLQMNSLRAEDTAVYYCAK | DISGAYSSGLFTF |
| GGSLRLSCAASGFTFS | | | | | |
| EVQLLESGGGLVQP | WYWMV | WVRQAPGKGLEWVS | SIVPSGGFTIYADSVKG | RFTISRDNSKNTLYLQMNSLRAEDTAVYYCAK | DIRGAYSSGLFDY |
| GGSLRLSCAASGFTFS | | | | | |
| EVQLLESGGGLVQP | WYWMH | WVRQAPGKGLEWVS | GISPSGGPTMYADSVKG | RFTISRDNSKNTLYLQMNSLRAEDTAVYYCAK | DIRGPYSSGLFDY |
| GGSLRLSCAASGFTFS | | | | | |
| EVQLLESGGGLVQP | PYWMH | WVRQAPGKGLEWVS | GIGPSGGLTFYADSVKG | RFTISRDNSKNTLYLQMNSLRAEDTAVYYCAR | DIRGAYSSGMFDF |
| GGSLRLSCAASGFTFS | | | | | |
| EVQLLESGGGLVQP | HYWMQ | WVRQAPGKGLEWVS | GIVPSGGLTMYADSVKG | RFTISRDNSKNTLYLQMNSLRAEDTAVYYCAK | DISGAYSSGLFTF |
| GGSLRLSCAASGFTFS | | | | | |
| EVQLLESGGGLVQP | WYWMG | WVRQAPGKGLEWVS | SISPSGGYTFYADSVKG | RFTISRDNSKNTLYLQMNSLRAEDTAVYYCAR | DMRGAYASGLFDY |
| GGSLRLSCAASGFTFS | | | | | |
| EVQLLESGGGLVQP | PYWMH | WVRQAPGKGLEWVS | GIGPSGGLTFYADSVKG | RFTISRDNSKNTLYLQMNSLRAEDTAVYYCAK | DIRGAYSSGLFDF |
| GGSLRLSCAASGFTFS | | | | | |
| EVQLLESGGGLVQP | EYWMT | WVRQAPGKGLEWVS | GISPSGGMTFYADSVKG | RFTISRDNSKNTLYLQMNSLRAEDTAVYYCAR | DMRGAYASGLFDY |
| GGSLRLSCAASGFTFS | | | | | |
| EVQLLESGGGLVQP | WYWMH | WVRQAPGKGLEWVS | GIVSSGGTTIYADSVKG | RFTISRDNSKNTLYLQMNSLRAEDTAVYYCAK | DIRGPYSSGLFDY |
| GGSLRLSCAASGFTFS | | | | | |
| EVQLLESGGGLVQP | PYNMH | WVRQAPGKGLEWVS | GISPSGGNTMYADSVKG | RFTISRDDSKNTLYLQMNSLGAEATAVYYCAR | DIRGAYSSGHFDY |
| GGSLRLSCAASGFTFS | | | | | |
| EVQLLESGGGLVQP | WYWMG | WVRQAPGKGLEWVS | SISPSGGYTFYADSVKG | RFTISRDNSKNTLYLQMNSLRAEDTAVYYCAK | DIRGAYSSGLFDY |
| GGSLRLSCAASGFTFS | | | | | |
| EVQLLESGGGLVQP | EYWMT | WVRQAPGKGLEWVS | GISPSGGMTFYADSVKG | RFTISRDNSKNTLYLQMNSLRAEDTAVYYCAK | DIRGAYSSGLFDY |
| GGSLRLSCAASGFTFS | | | | | |
| EVQLLESGGGLVQP | WYWMV | WVRQAPGKGLEWVS | SIVPSGGFTIYADSVKG | RFTISRDNSKNTLYLQMNSLRAEDTAVYYCAR | DLSGEYASGLFGY |
| GGSLRLSCAASGFTFS | | | | | |
| EVQLLESGGGLVQP | WYNMS | WVRQAPGKGLEWVS | RISPSGGDTGYADSVKG | RFTISRDNSKNTLYLQMNSLRAEDTAVYYCAK | DIRGAYSGGLFDY |
| GGSLRLSCAASGFTFS | | | | | |
| EVQLLESGGGLVQP | EYWMT | WVRQAPGKGLEWVS | GISPSGGMTFYADSVKG | RFTISRDNSKNTLYLQMNSLRAEDTAVYYCAR | DIRGAYSSGMFDF |
| GGSLRLSCAASGFTFS | | | | | |
| EVQLLESGGGLVQP | WYWMV | WVRQAPGKGLEWVS | SIGPSGGDTYYADSVKG | RFTISRDNSKNTLYLQMNSLRAEDTAVYYCAR | DLSGEYASGLFGY |
| GGSLRLSCAASGFTFS | | | | | |
| EVQLLESGGGLVQP | WYWMV | WVRQAPGKGLEWVS | SIVPSGGFTIYADSVKG | RFTISRDNSKNTLYLQMNSLRAEDTAVYYCAK | DISGAYSSGLFTF |
| GGSLRLSCAASGFTFS | | | | | |
| EVQLLESGGGLVQP | WYWMH | WVRQAPGKGLEWVS | GIVSSGGTTIYADSVKG | RFTISRDNSKNTLYLQMNSLRAEDTAVYYCAK | DIRGAYSSGLFDH |
| GGSLRLSCAASGFTFS | | | | | |
| EVQLLESGGGLVQP | AYWMH | WVRQAPGKGLEWVS | GISPSGGLTFYADSVKG | RFTISRDNSKNTLYLQMNSLRAEDTAVYYCAR | DIWGAYASGLFDY |
| GGSLRLSCAASGFTFS | | | | | |
| EVQLLESGGGLVQP | WYWMV | WVRQAPGKGLEWVS | SIGPSGGDTYYADSVKG | RFTISRDNSKNTLYLQMNSLRAEDTAVYYCAR | DIWGAYSAGHFEY |
| GGSLRLSCAASGFTFS | | | | | |
| EVQLLESGGGLVQP | WYWMH | WVRQAPGKGLEWVS | GIVSSGGTTIYADSVKG | RFTISRDNSKNTLYLQMNSLRAEDTAVYYCAR | DIWGAYSAGHFEY |
| GGSLRLSCAASGFTFS | | | | | |
| EVQLLESGGGLVQP | WYWMH | WVRQAPGKGLEWVS | GIVSSGGTTIYADSVKG | RFTISRDNSKNTLYLQMNSLRAEDTAVYYCAR | DIRGAYSSGLFYD |
| GGSLRLSCAASGFTFS | | | | | |
| EVQLLESGGGLVQP | PYWMS | WVRQAPGKGLEWVS | GISPSGGITFYADSVKG | RFTISRDNSKNTLYLQMNSLRAEDTAVYYCAR | DLSGEYASGLFGY |
| GGSLRLSCAASGFTFS | | | | | |
| EVQLLESGGGLVQP | YYGMG | WVRQAPGKGLEWVS | VISSSGGFTFYADSVKG | RFTISRDNSKNTLYLQMNSLRAEDTAVYYCAK | DISGAYSSGLFTF |
| GGSLRLSCAASGFTFS | | | | | |
| EVQLLESGGGLVQP | WYWMH | WVRQAPGKGLEWVS | GIVSSGGTTIYADSVKG | RFTISRDNSKNTLYLQMNSLRAEDTAVYYCAK | DIRGAYSSGLFDF |
| GGSLRLSCAASGFTFS | | | | | |
| EVQLLESGGGLVQP | WYWMG | WVRQAPGKGLEWVS | SISPSGGYTFYADSVKG | RFTISRDNSKNTLYLQMNSLRAEDTAVYYCAR | DLSGEYASGLFGY |
| GGSLRLSCAASGFTFS | | | | | |
| EVQLLESGGGLVQP | PYWMH | WVRQAPGKGLEWVS | GISPSGGNTLYADSVKG | RFTISRDNSKNTLYLQMNSLRAEDTAVYYCAK | DIRGAYSSGLFDY |
| GGSLRLSCAASGFTFS | | | | | |
| EVQLLESGGGLVQP | WYWMH | WVRQAPGKGLEWVS | GIVSSGGTTIYADSVKG | RFTISRDNSKNTLYLQMNSLRAEDTAVYYCAR | DFSGAYSAGLFAY |
| GGSLRLSCAASGFTFS | | | | | |
| EVQLLESGGGLVQP | PYWMH | WVRQAPGKGLEWVS | GIGPSGGPTFYADSVKG | RFTISRDNSKNTLYLQMNSLRAEDTAVYYCAK | DIRGAYSSGLFDY |
| GGSLRLSCAASGFTFS | | | | | |
| EVQLLESGGGLVQP | EYWMA | WVRQAPGKGLEWVS | SISPSGGHTFYADSVKG | RFTISRDNSKNTLYLQMNSLRAEDTAVYYCAK | DIRGPYSSGLFDY |
| GGSLRLSCAASGFTFS | | | | | |
| EVQLLESGGGLVQP | WYWMV | WVRQAPGKGLEWVS | SIGPSGGDTYYADSVKG | RFTISRDNSKNTLYLQMNSLRAEDTAVYYCAK | DIRGAYSSGLFDY |
| GGSLRLSCAASGFTFS | | | | | |
| EVQLLESGGGLVQP | PYWMH | WVRQAPGKGLEWVS | GIGPSGGLTFYADSVKG | RFTISRDNSKNTLYLQMNSLRAEDTAVYYCAK | DIRGAYSSGLFDH |
| GGSLRLSCAASGFTFS | | | | | |
| EVQLLESGGGLVQP | HYWMQ | WVRQAPGKGLEWVS | GIVPSGGLTMYADSVKG | RFTISRDNSKNTLYLQMNSLRAEDTAVYYCAR | DIMGAYASGLFHN |
| GGSLRLSCAASGFTFS | | | | | |
| EVQLLESGGGLVQP | EYWMT | WVRQAPGKGLEWVS | GISPSGGMTFYADSVKG | RFTISRDNSKNTLYLQMNSLRAEDTAVYYCAK | DIRGAYSSGLFDF |
| GGSLRLSCAASGFTFS | | | | | |
| EVQLLESGGGLVQP | PYWMS | WVRQAPGKGLEWVS | GISPSGGITFYADSVKG | RFTISRDNSKNTLYLQMNSLRAEDTAVYYCAR | DIWGAYSAGHFEY |
| GGSLRLSCAASGFTFS | | | | | |
| EVQLLESGGGLVQP | WYWMH | WVRQAPGKGLEWVS | GIVSSGGTTIYADSVKG | RFTISRDNSKNTLYLQMNSLRAEDTAVYYCAR | DLSGEYASGLFGY |
| GGSLRLSCAASGFTFS | | | | | |
| EVQLLESGGGLVQP | WYWMV | WVRQAPGKGLEWVS | SIGPSGGDTYYADSVKG | RFTISRDNSKNTLYLQMNSLRAEDTAVYYCAR | DMRGAYASGLFDY |
| GGSLRLSCAASGFTFS | | | | | |
| EVQLLESGGGLVQP | WYNMS | WVRQAPGKGLEWVS | RISPSGGDTGYADSVKG | RFTISRDNSKNTLYLQMNSLRAEDTAVYYCAK | DIRGAYSSGLFDH |
| GGSLRLSCAASGFTFS | | | | | |
| EVQLLESGGGLVQP | PYWMH | WVRQAPGKGLEWVS | GIGPSGGPTFYADSIKG | RFTISRDNSKNTLYLQMNSLRAEDTAVYYCAK | DIRGAYSGGLFDY |
| GGSLRLSCAASGFTFS | | | | | |

[0476] Cycle 3 Light Chain Amino Acid Sequences (provided in the same order as the Cycle 3 Light Chains provided above)

LV-AA
QDIQMTQSPSSLSASVGDRVTITCRANQSIYTYLNWYQQKPGKAPELLIYAASSLQSGVPSRF
SGSGSGTDFTLTISSLQPEDFATYYCQQAGIFGQGTKLEIK
QDIQMTQSPSSLSASVGDRVTITCRANQSIYTYLNWYQQKPGKAPELLIYAASSLQSGVPSRF
SGSGSGTDFTLTISSLQPEDFATYYCQQAGIFGQGTKLEIK
QDIQMTQSPSSLSASVGDRVTITCRANQSIYTYLNWYQQKPGKAPELLIYAASSLQSGVPSRF
SGSGSGTDFTLTISSLQPEDFATYYCQQAGIFGQGTKLEIK
QDIQMTQSPSSLSASVGDRVTITCRANQSIYTYLNWYQQKPGKAPELLIYAASSLQSGVPSRF
SGSGSGTDFTLTISSLQPEDFATYYCQQAGIFGQGTKLEIK
QDIQMTQSPSSLSASVGDRVTITCRANQSIYTYLNWYQQKPGKAPELLIYAASSLQSGVPSRF
SGSGSGTDFTLTISSLQPEDFATYYCQQAGIFGQGTKLEIK
QDIQMTQSPSSLSASVGDRVTITCRANQSIYTYLNWYQQKPGKAPELLIYAASSLQSGVPSRF
SGSGSGTDFTLTISSLQPEDFATYYCQQAGIFGQGTKLEIK
QDIQMTQSPSSLSASVGDRVTITCRANQSIYTYLNWYQQKPGKAPELLIYAASSLQSGVPSRF
SGSGSGTDFTLTISSLQPEDFATYYCQQAGIFGQGTKLEIK
QDIQMTQSPSSLSASVGDRVTITCRANQSIYTYLNWYQQKPGKAPELLIYAASSLQSGVPSRF
SGSGSGTDFTLTISSLQPEDFATYYCQQAGIFGQGTKLEIK
QDIQMTQSPSSLSASVGDRVTITCRANQSIYTYLNWYQQKPGKAPELLIYAASSLQSGVPSRF
SGSGSGTDFTLTISSLQPEDFATYYCQQAGIFGQGTKLEIK
QDIQMTQSPSSLSASVGDRVTITCRANQSIYTYLNWYQQKPGKAPELLIYAASSLQSGVPSRF
SGSGSGTDFTLTISSLQPEDFATYYCQQAGIFGQGTKLEIK
QDIQMTQSPSSLSASVGDRVTITCRANQSIYTYLNWYQQKPGKAPELLIYAASSLQSGVPSRF
SGSGSGTDFTLTISSLQPEDFATYYCQQAGIFGQGTKLEIK
QDIQMTQSPSSLSASVGDRVTITCRANQSIYTYLNWYQQKPGKAPELLIYAASSLQSGVPSRF
SGSGSGTDFTLTISSLQPEDFATYYCQQAGIFGQGTKLEIK
QDIQMTQSPSSLSASVGDRVTITCRANQSIYTYLNWYQQKPGKAPELLIYAASSLQSGVPSRF
SGSGSGTDFTLTISSLQPEDFATYYCQQAGIFGQGTKLEIK
QDIQMTQSPSSLSASVGDRVTITCRANQSIYTYLNWYQQKPGKAPELLIYAASSLQSGVPSRF
SGSGSGTDFTLTISSLQPEDFATYYCQQAGIFGQGTKLEIK
QDIQMTQSPSSLSASVGDRVTITCRANQSIYTYLNWYQQKPGKAPELLIYAASSLQSGVPSRF
SGSGSGTDFTLTISSLQPEDFATYYCQQAGIFGQGTKLEIK
QDIQMTQSPSSLSASVGDRVTITCRANQSIYTYLNWYQQKPGKAPELLIYAASSLQSGVPSRF
SGSGSGTDFTLTISSLQPEDFATYYCQQAGIFGQGTKLEIK
QDIQMTQSPSSLSASVGDRVTITCRANQSIYTYLNWYQQKPGKAPELLIYAASSLQSGVPSRF
SGSGSGTDFTLTISSLQPEDFATYYCQQAGIFGQGTKLEIK
QDIQMTQSPSSLSASVGDRVTITCRANQSIYTYLNWYQQKPGKAPELLIYAASSLQSGVPSRF
SGSGSGTDFTLTISSLQPEDFATYYCQQAGIFGQGTKLEIK
QDIQMTQSPSSLSASVGDRVTITCRANQSIYTYLNWYQQKPGKAPELLIYAASSLQSGVPSRF
SGSGSGTDFTLTISSLQPEDFATYYCQQAGIFGQGTKLEIK
QDIQMTQSPSSLSASVGDRVTITCRANQSIYTYLNWYQQKPGKAPELLIYAASSLQSGVPSRF
SGSGSGTDFTLTISSLQPEDFATYYCQQAGIFGQGTKLEIK
QDIQMTQSPSSLSASVGDRVTITCRANQSIYTYLNWYQQKPGKAPELLIYAASSLQSGVPSRF
SGSGSGTDFTLTISSLQPEDFATYYCQQAGIFGQGTKLEIK
QDIQMTQSPSSLSASVGDRVTITCRANQSIYTYLNWYQQKPGKAPELLIYAASSLQSGVPSRF
SGSGSGTDFTLTISSLQPEDFATYYCQQAGIFGQGTKLEIK
QDIQMTQSPSSLSASVGDRVTITCRANQSIYTYLNWYQQKPGKAPELLIYAASSLQSGVPSRF
SGSGSGTDFTLTISSLQPEDFATYYCQQAGIFGQGTKLEIK
QDIQMTQSPSSLSASVGDRVTITCRANQSIYTYLNWYQQKPGKAPELLIYAASSLQSGVPSRF
SGSGSGTDFTLTISSLQPEDFATYYCQQAGIFGQGTKLEIK
QDIQMTQSPSSLSASVGDRVTITCRANQSIYTYLNWYQQKPGKAPELLIYAASSLQSGVPSRF
SGSGSGTDFTLTISSLQPEDFATYYCQQAGIFGQGTKLEIK
QDIQMTQSPSSLSASVGDRVTITCRANQSIYTYLNWYQQKPGKAPELLIYAASSLQSGVPSRF
SGSGSGTDFTLTISSLQPEDFATYYCQQAGIFGQGTKLEIK
QDIQMTQSPSSLSASVGDRVTITCRANQSIYTYLNWYQQKPGKAPELLIYAASSLQSGVPSRF
SGSGSGTDFTLTISSLQPEDFATYYCQQAGIFGQGTKLEIK
QDIQMTQSPSSLSASVGDRVTITCRANQSIYTYLNWYQQKPGKAPELLIYAASSLQSGVPSRF
SGSGSGTDFTLTISSLQPEDFATYYCQQAGIFGQGTKLEIK
QDIQMTQSPSSLSASVGDRVTITCRANQSIYTYLNWYQQKPGKAPELLIYAASSLQSGVPSRF
SGSGSGTDFTLTISSLQPEDFATYYCQQAGIFGQGTKLEIK
QDIQMTQSPSSLSASVGDRVTITCRANQSIYTYLNWYQQKPGKAPELLIYAASSLQSGVPSRF
SGSGSGTDFTLTISSLQPEDFATYYCQQAGIFGQGTKLEIK
QDIQMTQSPSSLSASVGDRVTITCRANQSIYTYLNWYQQKPGKAPELLIYAASSLQSGVPSRF
SGSGSGTDFTLTISSLQPEDFATYYCQQAGIFGQGTKLEIK
QDIQMTQSPSSLSASVGDRVTITCRANQSIYTYLNWYQQKPGKAPELLIYAASSLQSGVPSRF
SGSGSGTDFTLTISSLQPEDFATYYCQQAGIFGQGTKLEIK
QDIQMTQSPSSLSASVGDRVTITCRANQSIYTYLNWYQQKPGKAPELLIYAASSLQSGVPSRF
SGSGSGTDFTLTISSLQPEDFATYYCQQAGIFGQGTKLEIK
QDIQMTQSPSSLSASVGDRVTITCRANQSIYTYLNWYQQKPGKAPELLIYAASSLQSGVPSRF
SGSGSGTDFTLTISSLQPEDFATYYCQQAGIFGQGTKLEIK
QDIQMTQSPSSLSASVGDRVTITCRANQSIYTYLNWYQQKPGKAPELLIYAASSLQSGVPSRF
SGSGSGTDFTLTISSLQPEDFATYYCQQAGIFGQGTKLEIK
QDIQMTQSPSSLSASVGDRVTITCRANQSIYTYLNWYQQKPGKAPELLIYAASSLQSGVPSRF
SGSGSGTDFTLTISSLQPEDFATYYCQQAGIFGQGTKLEIK
QDIQMTQSPSSLSASVGDRVTITCRANQSIYTYLNWYQQKPGKAPELLIYAASSLQSGVPSRF
SGSGSGTDFTLTISSLQPEDFATYYCQQAGIFGQGTKLEIK
QDIQMTQSPSSLSASVGDRVTITCRANQSIYTYLNWYQQKPGKAPELLIYAASSLQSGVPSRF
SGSGSGTDFTLTISSLQPEDFATYYCQQAGIFGQGTKLEIK
QDIQMTQSPSSLSASVGDRVTITCRANQSIYTYLNWYQQKPGKAPELLIYAASSLQSGVPSRF
SGSGSGTDFTLTISSLQPEDFATYYCQQAGIFGQGTKLEIK
QDIQMTQSPSSLSASVGDRVTITCRANQSIYTYLNWYQQKPGKAPELLIYAASSLQSGVPSRF
SGSGSGTDFTLTISSLQPEDFATYYCQQAGIFGQGTKLEIK
QDIQMTQSPSSLSASVGDRVTITCRANQSIYTYLNWYQQKPGKAPELLIYAASSLQSGVPSRF
SGSGSGTDFTLTISSLQPEDFATYYCQQAGIFGQGTKLEIK
QDIQMTQSPSSLSASVGDRVTITCRANQSIYTYLNWYQQKPGKAPELLIYAASSLQSGVPSRF
SGSGSGTDFTLTISSLQPEDFATYYCQQAGIFGQGTKLEIK
QDIQMTQSPSSLSASVGDRVTITCRANQSIYTYLNWYQQKPGKAPELLIYAASSLQSGVPSRF
SGSGSGTDFTLTISSLQPEDFATYYCQQAGIFGQGTKLEIK
QDIQMTQSPSSLSASVGDRVTITCRANQSIYTYLNWYQQKPGKAPELLIYAASSLQSGVPSRF
SGSGSGTDFTLTISSLQPEDFATYYCQQAGIFGQGTKLEIK
QDIQMTQSPSSLSASVGDRVTITCRANQSIYTYLNWYQQKPGKAPELLIYAASSLQSGVPSRF
SGSGSGTDFTLTISSLQPEDFATYYCQQAGIFGQGTKLEIK

[0477] Cycle 3Heavy Chain Amino Acid Sequences (provided In the same order as the Cycle 3 Light Chains provided above)

HV-AA
EVQLLESGGGLVQPGGSLRLSCAASGFTFSPYWMHWVRQAPGKGLEWVSG
ISPSGGETIYADSVKGRFTISRDNSKNTLYLQMNSLRAEDTAVYYCARDI
WGAYASGLFDYWGRGTLVTVSS
EVQLLESGGGLVQPGGSLRLSCAASGFTFSWYWMVWVRQAPGKGLEWVSS
IGPSGGDTYYADSVKGRFTISRDNSKNTLYLQMNSLRAEDTAVYYCARDI
RGAYSSGLFYDWGRGTLVTVSS
EVQLLESGGGLVQPGGSLRLSCAASGFTFSEYWMAWVRQAPGKGLEWVSS
ISPSGGHTFYADSVKGRFTISRDNSKNTLYLQMNSLRAEDTAVYYCARDM
RGAYASGLFDYWGRGTLVTVSS
EVQLLESGGGLVQPGGSLRLSCAASGFTFSPYWMHWVRQAPGKGLEWVSG
IGPSGGPTFYADSIKGRFTISRDNSKNTLYLQMNSLRAEDTAVYYCARDI
WGAYASGLFDYWGRGTLVTVSS
EVQLLESGGGLVQPGGSLRLSCAASGFTFSPYWMHWVRQAPGKGLEWVSG
IGPSGGPTFYADSIKGRFTISRDNSKNTLYLQMNSLRAEDTAVYYCAKDI
RGPYSSGLFDYWGRGTLVTVSS
EVQLLESGGGLVQPGGSLRLSCAASGFTFSWYWMHWVRQAPGKGLEWVSG
IVSSGGTTIYADSVKGRFTISRDDSKNTLYLQMNSLGAEATAVYYCARDI
RGAYSSGHFDYWGRGTLVTVSS
EVQLLESGGGLVQPGGSLRLSCAASGFTFSPYWMHWVRQAPGKGLEWVSG
ISPSGGNTLYADSVKGRFTISRDNSKNTLYLQMNSLRAEDTAVYYCAKDI
SGAYSSGLFTFWGRGTLVTVSS
EVQLLESGGGLVQPGGSLRLSCAASGFTFSWYWMVWVRQAPGKGLEWVSS
IVPSGGFTIYADSVKGRFTISRDNSKNTLYLQMNSLRAEDTAVYYCAKDI
RGAYSSGLFDYWGRGTLVTVSS
EVQLLESGGGLVQPGGSLRLSCAASGFTFSWYWMHWVRQAPGKGLEWVSG
ISPSGGPTMYADSVKGRFTISRDNSKNTLYLQMNSLRAEDTAVYYCAKDI
RGPYSSGLFDYWGRGTLVTVSS
EVQLLESGGGLVQPGGSLRLSCAASGFTFSPYWMHWVRQAPGKGLEWVSG
IGPSGGLTFYADSVKGRFTISRDNSKNTLYLQMNSLRAEDTAVYYCARDI
RGAYSSGMFDFWGRGTLVTVSS
EVQLLESGGGLVQPGGSLRLSCAASGFTFSHYWMQWVRQAPGKGLEWVSG
IVPSGGLTMYADSVKGRFTISRDNSKNTLYLQMNSLRAEDTAVYYCAKDI
SGAYSSGLFTFWGRGTLVTVSS
EVQLLESGGGLVQPGGSLRLSCAASGFTFSWYWMGWVRQAPGKGLEWVSS
ISPSGGYTFYADSVKGRFTISRDNSKNTLYLQMNSLRAEDTAVYYCARDM
RGAYASGLFDYWGRGTLVTVSS
EVQLLESGGGLVQPGGSLRLSCAASGFTFSPYWMHWVRQAPGKGLEWVSG
IGPSGGLTFYADSVKGRFTISRDNSKNTLYLQMNSLRAEDTAVYYCAKDI
RGAYSSGLFDFWGRGTLVTVSS
EVQLLESGGGLVQPGGSLRLSCAASGFTFSEYWMTWVRQAPGKGLEWVSG
ISPSGGMTFYADSVKGRFTISRDNSKNTLYLQMNSLRAEDTAVYYCARDM
RGAYASGLFDYWGRGTLVTVSS
EVQLLESGGGLVQPGGSLRLSCAASGFTFSWYWMHWVRQAPGKGLEWVSG
IVSSGGTTIYADSVKGRFTISRDNSKNTLYLQMNSLRAEDTAVYYCAKDI
RGPYSSGLFDYWGRGTLVTVSS
EVQLLESGGGLVQPGGSLRLSCAASGFTFSPYNMHWVRQAPGKGLEWVSG
ISPSGGNTMYADSVKGRFTISRDDSKNTLYLQMNSLGAEATAVYYCARDI
RGAYSSGHFDYWGRGTLVTSL
EVQLLESGGGLVQPGGSLRLSCAASGFTFSWYWMGWVRQAPGKGLEWVSS
ISPSGGYTFYADSVKGRFTISRDNSKNTLYLQMNSLRAEDTAVYYCAKDI
RGAYSSGLFDYWGRGTLVTVSS
EVQLLESGGGLVQPGGSLRLSCAASGFTFSEYWMTWVRQAPGKGLEWVSG
ISPSGGMTFYADSVKGRFTISRDNSKNTLYLQMNSLRAEDTAVYYCAKDI
RGAYSSGLFDYWGRGTLVTVSS
EVQLLESGGGLVQPGGSLRLSCAASGFTFSWYWMVWVRQAPGKGLEWVSS
IVPSGGFTIYADSVKGRFTISRDNSKNTLYLQMNSLRAEDTAVYYCARDL
SGEYASGLFGYWGRGTLVTVSS
EVQLLESGGGLVQPGGSLRLSCAASGFTFSWYNMSWVRQAPGKGLEWVSR
ISPSGGDTGYADSVKGRFTISRDNSKNTLYLQMNSLRAEDTAVYYCAKDI
RGAYSGGLFDYWGRGTLVTVSS
EVQLLESGGGLVQPGGSLRLSCAASGFTFSEYWMTWVRQAPGKGLEWVSG
ISPSGGMTFYADSVKGRFTISRDNSKNTLYLQMNSLRAEDTAVYYCARDI
RGAYSSGMFDFWGRGTLVTVSS
EVQLLESGGGLVQPGGSLRLSCAASGFTFSWYWMVWVRQAPGKGLEWVSS
IGPSGGDTYYADSVKGRFTISRDNSKNTLYLQMNSLRAEDTAVYYCARDL
SGEYASGLFGYWGRGTLVTVSS
EVQLLESGGGLVQPGGSLRLSCAASGFTFSWYWMVWVRQAPGKGLEWVSS
IVPSGGFTIYADSVKGRFTISRDNSKNTLYLQMNSLRAEDTAVYYCAKDI
SGAYSSGLFTFWGRGTLVTVSS
EVQLLESGGGLVQPGGSLRLSCAASGFTFSWYWMHWVRQAPGKGLEWVSG
IVSSGGTTIYADSVKGRFTISRDNSKNTLYLQMNSLRAEDTAVYYCAKDI
RGAYSSGLFDHWGRGTLVTVSS
EVQLLESGGGLVQPGGSLRLSCAASGFTFSAYWMHWVRQAPGKGLEWVSG
ISPSGGLTFYADSVKGRFTISRDNSKNTLYLQMNSLRAEDTAVYYCARDI
WGAYASGLFDYWGRGTLVTVSS
EVQLLESGGGLVQPGGSLRLSCAASGFTFSWYWMVWVRQAPGKGLEWVSS
IGPSGGDTYYADSVKGRFTISRDNSKNTLYLQMNSLRAEDTAVYYCARDI
WGAYSAGHFEYWGRGTLVTVSS
EVQLLESGGGLVQPGGSLRLSCAASGFTFSWYWMHWVRQAPGKGLEWVSG
IVSSGGTTIYADSVKGRFTISRDNSKNTLYLQMNSLRAEDTAVYYCARDI
WGAYSAGHFEYWGRGTLVTVSS
EVQLLESGGGLVQPGGSLRLSCAASGFTFSWYWMHWVRQAPGKGLEWVSG
IVSSGGTTIYADSVKGRFTISRDNSKNTLYLQMNSLRAEDTAVYYCARDI
RGAYSSGLFYDWGRGTLVTVSS
EVQLLESGGGLVQPGGSLRLSCAASGFTFSPYWMSWVRQAPGKGLEWVSG
ISPSGGITFYADSVKGRFTISRDNSKNTLYLQMNSLRAEDTAVYYCARDL
SGEYASGLFGYWGRGTLVTVSS
EVQLLESGGGLVQPGGSLRLSCAASGFTFSYYGMGWVRQAPGKGLEWVSV
ISSSGGFTFYADSVKGRFTISRDNSKNTLYLQMNSLRAEDTAVYYCAKDI
SGAYSSGLFTFWGRGTLVTVSS
EVQLLESGGGLVQPGGSLRLSCAASGFTFSWYWMHWVRQAPGKGLEWVSG
IVSSGGTTIYADSVKGRFTISRDNSKNTLYLQMNSLRAEDTAVYYCAKDI
RGAYSSGLFDFWGRGTLVTVSS
EVQLLESGGGLVQPGGSLRLSCAASGFTFSWYWMGWVRQAPGKGLEWVSS
ISPSGGYTFYADSVKGRFTISRDNSKNTLYLQMNSLRAEDTAVYYCARDL
SGEYASGLFGYWGRGTLVTVSS
EVQLLESGGGLVQPGGSLRLSCAASGFTFSPYWMHWVRQAPGKGLEWVSG
ISPSGGNTLYADSVKGRFTISRDNSKNTLYLQMNSLRAEDTAVYYCAKDI
RGAYSSGLFDYWGRGTLVTVSS
EVQLLESGGGLVQPGGSLRLSCAASGFTFSWYWMHWVRQAPGKGLEWVSG
IVSSGGTTIYADSVKGRFTISRDNSKNTLYLQMNSLRAEDTAVYYCARDF
SGAYSAGLFAYWGRGTLVTVSS
EVQLLESGGGLVQPGGSLRLSCAASGFTFSPYWMHWVRQAPGKGLEWVSG
ISPSGGPTFYADSVKGRFTISRDNSKNTLYLQMNSLRAEDTAVYYCAKDI
RGAYSSGLFDYWGRGTLVTVSS
EVQLLESGGGLVQPGGSLRLSCAASGFTFSEYWMAWVRQAPGKGLEWVSS
ISPSGGHTFYADSVKGRFTISRDNSKNTLYLQMNSLRAEDTAVYYCAKDI
RGPYSSGLFDYWGRGTLVTVSS
EVQLLESGGGLVQPGGSLRLSCAASGFTFSWYWMVWVRQAPGKGLEWVSS
IGPSGGDTYYADSVKGRFTISRDNSKNTLYLQMNSLRAEDTAVYYCAKDI
RGAYSSGLFDYWGRGTLVTVSS
EVQLLESGGGLVQPGGSLRLSCAASGFTFSPYWMHWVRQAPGKGLEWVSG
IGPSGGLTFYADSVKGRFTISRDNSKNTLYLQMNSLRAEDTAVYYCAKDI
RGAYSSGLFDHWGRGTLVTVSS
EVQLLESGGGLVQPGGSLRLSCAASGFTFSHYWMQWVRQAPGKGLEWVSG
IVPSGGLTMYADSVKGRFTISRDNSKNTLYLQMNSLRAEDTAVYYCARDI
MGAYASGLFHNWGRGTLVTVSS
EVQLLESGGGLVQPGGSLRLSCAASGFTFSEYWMTWVRQAPGKGLEWVSG
ISPSGGMTFYADSVKGRFTISRDNSKNTLYLQMNSLRAEDTAVYYCAKDI
RGAYSSGLFDFWGRGTLVTVSS
EVQLLESGGGLVQPGGSLRLSCAASGFTFSPYWMSWVRQAPGKGLEWVSG
ISPSGGITFYADSVKGRFTISRDNSKNTLYLQMNSLRAEDTAVYYCARDI
WGAYSAGHFEYWGRGTLVTVSS
EVQLLESGGGLVQPGGSLRLSCAASGFTFSWYWMHWVRQAPGKGLEWVSG
IVSSGGTTIYADSVKGRFTISRDNSKNTLYLQMNSLRAEDTAVYYCARDL
SGEYASGLFGYWGRGTLVTVSS
EVQLLESGGGLVQPGGSLRLSCAASGFTFSWYWMVWVRQAPGKGLEWVSS
IGPSGGDTYYADSVKGRFTISRDNSKNTLYLQMNSLRAEDTAVYYCARDM
RGAYASGLFDYWGRGTLVTVSS
EVQLLESGGGLVQPGGSLRLSCAASGFTFSWYNMSWVRQAPGKGLEWVSR
ISPSGGDTGYADSVKGRFTISRDNSKNTLYLQMNSLRAEDTAVYYCAKDI
RGAYSSGLFDHWGRGTLVTVSS
EVQLLESGGGLVQPGGSLRLSCAASGFTFSPYWMHWVRQAPGKGLEWVSG
IGPSGGPTFYADSIKGRFTISRDNSKNTLYLQMNSLRAEDTAVYYCAKDI
RGAYSGGLFDYWGRGTLVTVSS

### 1. MMP12 Binders

| | |
|---|---|
| Initial Name: | L-Variable (AA): |

| | |
|---|---|
| 539A-M0013-A02 | QDIQMTQSPGTLSLSPGERATLSCRASQSVSSYLAW |
| | YQQKPGQAPRLLIYDASNRATGIOARFSGSGSGTDF |
| | TLTISSLEPEDFAVYYCQQRSNWPITFGQGTRLEIK |
| 539A-M0013-A03 | QDIQMTQSPSSVSASVGDRVTITCRASQSISSWLAW |
| | YQQKPGKAPKLLISTASNLQSGVPSRFSGSGSGTDF |
| | TLTISSLQPEDFATYYCQQVSNFPITFGQGTRLEIK |
| 539A-M0013-A11 | QDIQMTQSPATLSLSPGERATLSCRASQSVSSYLAW |
| | YQQKPGQAPRLLIYDASNRATGIPARFSGSGSGTDF |
| | TLTISSLEPEDFAVYYCQHNEGWPWTFGQGTKVEVK |
| 539A-M0013-B07 | QDIQMTQSPSSLSASVGDRVTITCQASQDISNYLNW |
| | YQQKPGKAPKLLIYAASKLEDGVPSRFSGSGTGTDF |
| | TLTIRSLQPEDFASYFCQQSYSSPGITFGPGTKVEI |
| | K |
| 539A-M0013-B08 | QDIMTQSPSSFSASTGDRVTITCRASQGISSYLAWY |
| | QQKPGKAPKLLIYAASTLQSGVPSRFSGSGSGTHYT |
| | LTINSLQPEDFATYYCQQANSFPLTFGGGTKVEIK |
| 539A-M0013-B10 | QSVLTQPPSASGTPGQRVTISCSGSSSNIGSNTVNW |
| | YQQLPGTAPKLLIYSNNQRPSGVPDRFSGSKSGTSA |
| | PLAISGLQFEDEADYYCAVWDDSLNGWVFGGGTKLT |
| | VL |
| 539A-M0013-D02 | QDIQMTQSPGTLSLSPGERAALSCRASQSVSSNYLA |
| | WYQQKPGQAPRLLMYGASNRATGIPDRFSGSGSGTD |
| | FTLTISRLEPEDFAVYYCQQYGRSPRTFGQGTKLEI |
| | K |
| 539A-M0013-D04 | QDIQMTQSPGILSLSPGDRATLSCRASQSVTSSSLA |
| | WYQQRPGQSPRLLIYGASSRATGIPDRFSGSGSGTD |
| | FTLIISRLEPEDFASYYCQQYGGSPITFGPGTKVDI |
| | K |
| 539A-M0013-D06 | QDIQMTQSPSSVSASVGDRVTITCRASQDVGSWLAW |
| | YQQKPGKAPKLLIFAASSLESGIPSRFSGSGSGTDF |
| | TLTISSLQPEDFATYYCQQANGFPLTFGGGTKVEIK |
| 539A-M0013-D10 | QDIQMTQSPGTLSLSPGERATLSCRASQSVSSSYLA |
| | WYQQKPGQAPRLLIYGASSRATGIPDRFSGSGSGTD |
| | FTLTISRLEPEDFAVYYCQQYGSSPPITFGQGTRLE |
| | IK |
| 539A-M0013-E05 | QDIQMTQSPATLSLSPGERATLSCRASQSVDHFLAW |
| | YQQKPGQAPRLLIYGATNRATGVPARFNGTGSGTDF |
| | TLTISSLEPEDFAVYYCQQRLNWPPWTFGQGTKVEI |
| | K |
| 539A-M0013-F07 | QDIQMTQSPSSLSASVGDRVTITCRANQSIYTYLNW |
| | YQQKPGKAPELLIYAASSLQSGVPSRFSGSGSGTDF |
| | TLTISSLQPEDFATYYCQQAGIFGQGTKLEIK |
| 539A-M0013-G04 | QYELTQPPSASGTPGQTVTISCSGSTSNIGSNTVAW |
| | YQQVPGTAPKLLIHTNNQRPSGVSDRFSGSKSVASA |
| | SLAINGLQSEDEADYYCAGWDDSLNGAVFGGGTKVT |
| | VL |
| 539A-M0013-H04 | QDIQMTQSPSFLSASVGDRVTITCRASQGISSYLAW |
| | YQQKPGKAPKLLIYGASTLQSGVPSRFSGSGSGTDF |
| | TLTISSLQPEDFATYYCQQSYTTPYTFGQGTKLEIK |
| 539A-M0014-A09 | QDIQMTQSPGTLSLSPGERATLSCRASQSVSGSYLA |
| | WYQQKPGQAPRLLIYGASSRATGIPDRFSGSGSGTD |
| | FTLTITRLEPEDFAVYYCQQYGSSPRTFGQGTKVEI |
| | K |
| 539A-M0014-B09 | QDIQMTQSPSSLSASVGDRVTITCRTGQSFSNFLNW |
| | YQQKPGTAPNLLIYLASNLQSGVPSRFSGSRSGTDF |
| | TLTISSLQPEDSAIYYCQQSHSLPWTFGQGTKVEIK |
| 539A-M0014-D11 | QDIQMTQSPGTLSLSPGQRATLSCRASQTVNSNYIA |
| | WYQQRPGQAPRLLIYAASSRATGIPDRFSGSGSGTD |
| | FTLTIRSLEPEDFAVYYCQKYGRSPQTFGQGTKVEI |
| | K |
| 539A-M0015-G04 | QSALTQPPSTSGTPGQRVTISCSGSGSNIGSNPVNW |
| | YQQLPGAAPKLLIYSNDLRPSGVPDRFSGSKSGTSA |
| | SLAISGLQSEDEADYYCAAWDYSLNGPWVFGGGTKL |
| | TVL |
| 539A-M0016-A02 | QDIQMTQSPATLSLSPGERATLSCRASQSVSSNLAW |
| | YQQKPGQAPRLLIYDASNRATGIPARFSGSGSGTDF |
| | TLTISSLEPEDFAVYYCQQRSNWPPLTFGGGTKVEI |
| | K |
| 539A-M0016-A04 | QDIQMTQSPATLSLSPGERATLSCRASQSVSSYLAW |
| | YQQKPGQAPRLLIYDASNRATGIPARFSGSGSGTDF |
| | TLTISSLEPEDFAVYYCQQRSNWPLTFGGGTKVEIK |
| 539A-M0016-C03 | QDIQMTQSPGTLSLSPGERATLSCRASQSVSSNYLA |
| | WYQQKPGQAPRLLIYGASSRATGISDRFSGSGSGTD |
| | FTLTISRLEPEDFAVYYCQQYGTSPETFGGGTKVEI |
| | K |
| 539A-M0016-C10 | QDIQMTQSPSSLSASVGDRVTITCRASQGISNYLAW |
| | YQQKPGKVPKLLIYAASTLQSGVPSRFSGSGSGTDF |
| | TLTISSLQPEDVATYYCQKYNSAPFTFGPGTKVDIK |
| 539A-M0016-D07 | QYELTQPPSVSVSPGQTASITCSGDKLGDKYASWYQ |
| | QKPGQSPVLVVYHDTRRPSGIPERFSGSNSGNTATL |
| | TISGTQAMDEADYYCQAWDDITAVVFGGGTKLTVL |
| 539A-M0016-F03 | QSELTQPRSVSGSPGQSVTISCTGTSNDVGEYNYVS |
| | WYQQHPGKAPKVMIYDVTRRPSGVPDRFSGSKSGNT |
| | ASLTISGLQADDEAHYYCCSYAGRYTYVFGSGTNVT |
| | VL |
| 539A-M0016-H09 | QDIQMTQSPGTLSLSSGERATLSCRASQSVSSNYLA |
| | WYQQKRGQAPRLLIYGASSRATGVPGRFSGSGSGTD |
| | FTLTISRLEPEDFAVYYCQQYGSSPRTFGQGTKLEI |
| | K |
| 539A-M0018-A05 | QDIQMTQSPLSLPVTPGEPASISCRSSQSLLHSNGY |
| | NYLDWYLQKPGQSPQLLIYLGSNRASGVPDRFSGSG |
| | SGTDFTLKISRVEAEDVGVYYCMQALQTPYTFGQGT |
| | KLEIK |
| 539A-M0018-D01 | QDIQMTQSPSSLSASVGDRVTITCRASQSISIYLNW |
| | YQQKAGKAPKLLIYAASNLQSGVPSRFSGSGSGTDF |
| | TLTISSLQPEDFATYFCQQSYLPPLTFGGGTTVEIK |
| 539A-M0019-A10 | QDIQMTQSPSSLSASVGDRVTIACRASRFITTALGW |
| | YQQKSGTPPKLLIYDASYLDSGVPSRFSGSGSGTDF |
| | TLTINSVQPEDFATYYCQQFMTYPQGISFGQGTRLE |
| | IK |
| 539A-M0019-C07 | QSELTQPASVSGSPGQSITISCTGTSSDIGGYDYVS |
| | WYQQYPGKAPKLMIYHVSNRPSGVSTRFSGSKSANT |
| | ASLTISGLQAEDEADYYCSSYTSSSTYVFGTGTKVT |
| | VL |
| 539A-M0019-G07 | QDIQMTQSPSSLSASVGDRVTITCRASQSISTKLNW |
| | YQQKPGKAPNLLIYDTSTLQSGVPSRFSGSGSGTDF |
| | TLTISSLQLEDFASYYCQQTYGALTWTFGQGTKVEI |
| | K |
| 539A-M0019-G10 | QDIQMTQSPGTLSLSPGERATLSCRASQSVSSSYAA |
| | WYQLKPGQAPRLLIYGVSRRATGIPDRFSGSGSGTD |
| | FTLTISRLEPEDFAVYYCQQFGSSPTFGQGTKVEIK |
| 539A-M0020-C08 | QDIQMTQSPDSLSASVGDRVTITCRASQSISSYLNW |
| | YQQKPGKAPKLLIYAASSLQSGVPSRFSGSGSGTDF |
| | TLTISSLQPEDFATYYCQQSYSSPGITFGPGTKVEI |
| | K |
| 539A-M0020-H02 | QDIQMTQSPGTLSLSPGERATLSCRASQSVSSSYLA |
| | WYQQKPGQAPRLLIYGASSRATGIPDRFSGSGSGTD |
| | FTLTISRLEPEDFAVYYCQQYGSSLALTFGGGTKVE |
| | IK |
| 539A-M0021-B03 | QDIQMTQSPSSLSASVGDRVTITCRASQSISGSLNW |
| | YQQKPGKAPKLLIYAASILQSGVPSRFSGSGSGTDF |
| | TLTISSLQPEDFATYYCQQNYDLFGGLTFGPGTKVD |
| | VK |
| 539A-M0021-D06 | QDIQMTQSPSSLSASVGDRVTITCRTSQDFSNNLAW |
| | YQQRPGKAPKLLIYAASTLQSGVPSRFSGSGSGTDF |
| | TLTISSLQPEDVATYYCQRYDNGPLFGPGTKVHVK |
| 539A-M0021-E12 | QDIQMTQSPGTLSVSPGERATLSCRASQSVSSNLAW |
| | YQQKPGQAPRLLIYGASTRATGIPARFSGSGSGTEF |
| | TLTISSLQSEDFAVYYCQLYKTFGGGTKVEIK |
| 539A-M0021-G07 | QDIQMTQSPGTLSLSPGERATLSCRASQSVSSSYLA |
| | WYQQKPGQAPRLLIYGASSRATGIPDRFSGSGSGTD |
| | FTLTISRLEPEDFAVYYCQQYGSSPRTFGQGTKLEI |
| | K |
| 539A-M0022-A02 | QDIQMTQSPSSLSASVGDRVTITCRASQSISSYLNW |
| | YQQKPGKAPKLLIYAASSLQIGVPSRFSGSGSGTDF |
| | TLTISSLQPEDFATYYCQQSYITPLTFGPGTKVDIK |
| 539A-M0023-B11 | QDIQMTQSPSSLSASVGDRVTITCRANQGISNYLAW |
| | FQQKPGKAPKSLIYAASSLQSGVPSKFSGSGSGTDF |
| | TLTISSLQPEDSATYYCQQYNSFPLTFGGGTKVEIK |
| 539A-M0023-D03 | QDIQMTQSPATLSLSPGERATLSCRASQSVSSYLAW |
| | YQQKPGQAPRLLIYDASYRATGIPARFGGSGSGTDF |
| | TLTISSLEPEDFALYYCQQRSDWPRTFCQGTKLEIK |
| 539A-M0023-D05 | QSALTQPASVSGSPGQSITISCTGTSSDVGGYNYVS |
| | WYQQHPGKAPKLMIYDVSNRPSGVSNRFSGSKSGNT |
| | ASLTISGLQAEDEADYYCSSYTSSSTLDWFGGGTKL |
| | TVL |
| 539A-M0023-E09 | QSELTQPPSVSGSPRQSVTISCTGTTSDIGGYNHVS |
| | WYQHHPGKAPQLLIYDVTRRPSGVPDRFSASKSGNT |
| | ASLTISGLQAEDEAVYYCSSYGGSYSFHVFGTGTQV |
| | TVL |
| 539A-M0023-H01 | QDIQMTQSPGTLSLSPGETATLSCWASQSVAWYOQK |
| | PGQPPRLLIYDVSTRATGIPDRFSGSGSGTGSTLTI |
| | SRLEPEDFAVYFCQQYGYSPLSFDGGTKVEIKRTVA |
| | AP |
| 539A-M0024-C02 | QSELTQDPAVSVALGQTVRITCRGDRLRTYYSSWYQ |
| | QKPRQAPVLVMFGRNNRPSGIPDRFSGSTSGGTASL |
| | TITATQADDEADYFCSSRDGSGNFLFGGGTKLTVL |
| 539A-M0025-F02 | QDIQMTQSPLSLSASVGDRVTITCRASQSISSYLNW |
| | YQQKPGKAPKLLIYAASSLQSGVPSRFSGSGSGTDF |
| | TLTISSLQPEDFATYYCQQSYSTPYTFGQGTKLEIK |
| 539A-M0025-G01 | QSELTQPASVSGSPGQSVTISCSGISYDLYDYIYVS |
| | WYQQHPDKAPQLLLYDVDKRPSGISDRFSGSKSGDT |
| | ASLTISGLRTDDEAEYYCSSFTRTTTVYVFGTGTKV |
| | TVL |
| 539A-M0025-H03 | QDIQMTQSPSSLSASVGDRVTITCRASQSISSYLNW |
| | YQQKPGKAPKLLIYAASKLEDGVPSRFSGSGTGTDF |
| | TLTIRSLQPEDFASYFCQQSYSSPGITFGPGTKVEI |
| | K |
| 539A-M0025-H11 | QDIQMTQSPGTLSLSPGERATLSCRASQSVSSSYLA |
| | WYQQKPGQAPRLLIYGASSRATGIPDRFSGSGSGTD |
| | FTLTISRLEPEDIAVYYCQQYGSSAWTFGQGTKVEI |
| | K |
| 539A-M0026-A01 | QDIQMIQSPSSLSASVGDSVTITCRASQNINIYLNW |
| | YQQKPGKAPKLLISAASSLQSGVPSRFSGSGSGTDF |
| | TLTITDLQPEDLATYYCQQTYSAPPPWTFGPGTKVD |
| | IK |
| 539A-M0026-A05 | QDIQMTQSPATLSLSPGERATLSCRASQSVSRYLAW |
| | YQQKPGQAPRLLIYGASSRVHGIPDRFSGSGSGTDF |
| | TLTISRLEPEDFAVYYCQOYGGSPTTFGGGTKVEIK |
| 539A-M0026-A09 | QDIQMTQSPLSLPVTLGQPASISCRSSQSLVYINGN |
| | TYLNWFQQRPGQSPRRLIYNVSNRDSGVPERFSGSG |
| | SGTDFTLKISRVEAEDVGVYYCMQGTHWPPAFGQGT |
| | KVEIK |
| 539A-M0026-A10 | QDIQMTQSPGTLSLSPGERATLSCRASQSVSSSYLA |
| | WYQQKPGQAPRLLIYGASSRATGIPDRFSGSGSGTD |
| | FTLTISRLEPEDFAVYYCQQYGSSPPMYTFGQGTKL |
| | EIK |
| 539A-M0026-B11 | QDIQMTQSPSSLSASVGDRVAITCRASQSIDTYLNW |
| | YQQKPGKAPKLLIYAASKLEDGVPSRFSGSGTGTDF |
| | TLTIRSLQPEDFASYFCQQSYSSPGITFGPGTKVEI |
| | K |
| 539A-M0026-C03 | QSALTQPASVSGSPGQSITISCTGTSTDVGGYKYVS |
| | WYQQHPGKAPKLVIYEVSNRPSGVSNRFSGSKSGNT |
| | ASLTISGLQAEDEADYYCSSYTSSTTVVFGGGTKLT |
| | VL |
| 539A-M0026-C07 | QSELTQPPSASGTPGQRVTISCSGSSSNIGTNTVNW |
| | YQQLPGMAPKVVMSANNERPSGVPDRFSGSKTGTSA |
| | SLAISGLQSEDEADYYCAAWDENLSGPVFGTGTKVT |
| | VL |
| 539A-M0026-E01 | QDIQMTQSPATLSLSPGERATLSCRASQNVYSRLAW |
| | YQQKPGQAPRLLIYGASTRATGIPDRFSGSGSGTDF |
| | TLTISRLEPEDFALYYCQQYGSSPRTFGQGTKLEIR |
| 539A-M0026-E11 | QDIQMTQSPGTLSLSPGERATLSCRASQTISSNQLA |
| | WYQQQKPGQAPRLLVYGAFSTATGIPDRFIGGGSGT |
| | DFTLTISRLEPEDFAVYYCQQYGSSPLTFGGGTKVE |
| | IK |
| 539A-M0026-F03 | QDIQMTQSPGTLSLSPGESATLSCRASHSVDRLYLA |
| | WYQQKPGQAPRLLIYGTSSRATGIPDRVSGSGSGTD |
| | FTLTISRLEREDSAVYYCQHYGSLWTFGQGTKVEIK |
| 539A-M0026-F04 | QDIQMTQSPSSLSASVGDRVTITCRASQRIASYLNW |
| | YQQKFGKAPKLLIYAASSLQSCVPSRFSGSGSGTDF |
| | TLTVSSLQPEDFATYYCQQSYSAPLTFGGGTKVEIK |
| 539A-M0026-G12 | QDIQMTQSPSSLSASVGDRVTITCRASQSISSYLNW |
| | YQQKPGKAPKLLIYAASSLQSGVPSRFSGSGSGTDF |
| | TLTISSLQPEDFATYYCQSGLTFGGGTKVEIK |
| 539A-M0026-H05 | QDIQMTQSPSSLSASVDGRVTITCRASQSISSYLNW |
| | YQQKPGKAPKLLIYAASSLQSGVPSRFSGSGSGTDF |
| | TLTISSLQPEDFATYYCQQSYSTPYTFGQGTKLEIK |
| 539A-M0027-A08 | QSVLTQPASVSGSPCQSITISCTGTSTDVGGYNYVS |
| | WYQKHPGKAPKLMIYDVSNRPSGVSNRFSCSKSGNT |
| | ASLTISGLQAEDEADYYCSSYTNTITWFGGGTKLTV |
| | L |
| 539A-M0027-B03 | QDIQMTQSPSSLSASVGDRVTITCRASQGIRNDLGW |
| | YQQKPGKAPKLLIYAASSLQSGVPSRFSGSGFGTDF |
| | TLTISSLQPEDFATYYCLQDYRYPLTFGGGTKVEIK |
| 539A-M0027-B08 | QDIQMTQSPSSLSASVGDRVAITCRASQSIDTYLNW |
| | YQQKPGKAPKLLIYAASKLEDGVPSRFSGSGTGTDF |
| | TLTIRSLQPEDFASYFCQQSYSSPGITFGPGTKVEI |
| | K |
| 539A-M0027-C07 | QDIQMTQSPSSLSASVGDRVTITCRASQSISSYLNW |
| | YQQKPGKAPKLLIYAASKLEDGVPSRFSGSGTGTDF |
| | TLTINSLQPEDFATYYCQQSYNTPSFGPGTRVDVK |
| 539A-M0027-G02 | QDIQMTQSPATLSASVGDRVTITCRASQRISSYLNW |
| | YQQKPGKAPKLLIYAASSLQSGVPSRFSGSGSGTDF |
| | TLTISSLQPEDFATYYCQQSYSTPRTFGQGTKVEIK |
| 539A-M0027-H04 | QDIQMTQSPSSLSASVGDRVTITCRASQDISSWLVW |
| | YQQKPGKAPKVLIYAASSLQSGIPSRFSGSGSGTDF |
| | TLTISSLQPEDFATYYCQQANRFPLTFGGGTKVEIK |
| 539A-M0028-E09 | QDIQMTQSPATLSVSPGERATLSCRASQSVSSSLAW |
| | YQQKPGQAPRLLISETSNRATAIPAKFSGSGFGTDF |
| | TLTISSLEPEDSAVYYCQQHVSWPLTFGGGTKVEIK |
| 539A-M0028-F04 | QSALTQPPSVSCAPGQTVTISCTGTSSNIGTGYAVH |
| | WYQHLPGKAPKPLFSGDDNRPSGVPDRFSASKSGTS |
| | ASLAIARLQTEDEADYYCESYDYKLGGWVFGGGTKL |
| | TVL |

[0479] MMP-12 Binders (these are In the same order as the light chain sequences provided above)

H-Variable (AA):
EVQLLESGGGLVQPGGSLRLSCAASGFTFSYYKMHWVRQAPGKGLEWVSW
IGPSGGITDYADSVKGRFTISRDNSKNTLYLQMSLRAEDTAVYYCTTDDI
SDYYGMDVWGQGTTVTVSS
EVQLLESGGGLVQPGGSLRLSCAASGFTFSWYPMNWVRQAPGKGLEWVSV
IWPSGGETAYADSVKGRFTISRDNSKNTLYLQMNSLRAEDTAVYYCTTGR
FYGYYRDFDYWGWGTLVTVSS
EVQLLESGGGLVQPGGSLRLSCAASGFTFSWYDMLWVRQAPGKGLEWVSY
ISPSGGYTLYADSVKGRFTISRDNSKNTLYLQMNSLRAEDTAVYYCTTVP
TPYTYCSGGSCYRDAFDIWGQGTMVTVSS
EVQLLESGGGLVQPGGSLRLSCAASGFTFSYYPMYWVRQAPGKGLEWVSV
IGSSGGNTSYADSVKGRFTISRDNSKNTLYLQMNSLRAEDTAVYYCAGAH
YDFWSDYYGPDAFDIWGQGTMVTVSS
EVQLLESGGGLVQPGGSLRLSCAASGFTFSWYLMGWVRQAPGKGLEWVSS
IYPSGGITNYADSVKGRFTISRDNSKNTLYLQMNSLRAEDTAVYYCARGG
GADAFGIWGQGTMVTVSS
EVQLLESGGGLVQPGGSLRLSCAASGFTFSRYHMTWVRQAPGKGLEWVSS
ISPSGGPTYYADSVKGRFTISRDNSKNTLYLQMNSLRAEDTAVYYCAKGV
RSYYDFWSGYSLYYYYYYGMDVWGQGTTVTVSS
EVQLLESGGGLVQPGGSLRLSCAASGFTFSGYNMVWVRQAPGKGLEWVSI
VSSGGLTDYADSVKGRFTISRDNSKNTLYLQMNSLRAEDTAVYYCAKGLY
YYDSSGYYYGGAFDIWGQGTMVTVSS
EVQLLESGGGLVQPGGSLRLSCAASGFTFSTYQMWWVRQAPGKGLEWVSG
ISSSGGATGYADSVKGRFTISRDNSKNTLYLQMNSLRAEDTAVYYCTRVP
HYYDSSGYYGGLVDYWGQGTLVTVSS
EVQLLESGGGLVQPGGSLRLSCAASGFTFSRYLMHWVRQAPGKGLEWVSS
ISSSGGETDYADSVKGRFTISRDNSKNTLYLQMNSLRAEDTAVYYCAHGA
PLGDYYYYYGMDVWGQGTTVTVSS
EVQLLESGGGLVQPGGSLRLSCAASGFTFSRYGMTWVRQAPGKGLEWVSG
ISPSGGNTWYADSVKGRFTISRDNSKNTLYLQMNSLRAEDTAVYYCTSHD
YGDHYGMDVWGQGTLVTVSS
EVQLLESGGGLVQPGGSLRLSCAASGFTFSGYDMKWVRQAPGKGLEWVSY
ISSSGGPTVYADSVKGRFTISRDNSKNTLYLQMNSLRAEDTAVYYCATEL
YDSSGYLSLWGQGTLVTVSS
EVQLLESGGGLVQPGGSLRLSCAASGFTFSDYNMHWVRQAPGKGLEWVSY
IGPSGGYTHYADSVKGRFTISRDNSKNTLYLQMNSLRAEDTAVYYCAKDI
RGAYSSGLFDYWGRGTLVTVSS
EVQLLESGGGLVQPGGSLRLSCAASGFTFSQYPMVWVRQAPGKGLEWVSS
IYPSGGYTIYADSVKGRFTISRDNSKNTLYLQMNSLRAEDTAVYYCARGG
GNFDYWGQGTLVTVSS
EVQLLESGGGLVQPGGSLRLSCAASGFTFSWYNMFWVRQAPGKGLEWVSY
ISPSGGPTDYADSVKGRFTISRDNSKNTLYLQMNSLRAEDTAVYYCASEY
RGNYYGMDVWGQGTTVTVSS
EVQLLESGGGLVQPGGSLRLSCAASGFTFSMYYMMWVRQAPGKGLEWVSG
IYPSGGPTGYADSVKGRFTISRDNSKNTLYLQMNSLRAEDTAMYYCASND
YGYYYGMDVWGQGTTVTVSS
EVQLLESGGGLVQPGGSLRLSCAASGFTFSYYHMHWVRQAPGKGLEWVSG
IGPSGGMTYYADSVKGRFTISRDNSKNTLYLQMNSLRAEDTAVYYCARFN
YYYGLDVWGQGTTVTVSS
EVQLLESGGGLVQPGGSLRLSCAASGFTFSHYQMDWVRQAPGKGLEWVSG
ISSSGGNTQYADSVKGRFTISRDNSKNTLYLQMNSLRAEDTAVYYCASQD
YGRYYGMDVWGQGTTVTVSS
EVQLLESGGGLVQPGGSLRLSCAASGFTFSVYPMQWVRQAPGKGLEWVSG
ISSSGGFTMYADSVKGRFTISRDNSKNTLYLQMNSLRAEDMAVYYCARGG
DSLYGMDVWGQGTHGHRLK
EVQLLESGGGLVQPGGSLRLSCAASGFTFSWYEMTWVRQAPGKGLEWVSY
IGPSGGRTVYADSVKGRFTISRDNSKNTLYLQMNSLRAEDTAVYYCALVS
QGEISGLPYGMDVWGQGTTVTVSS
EVQLLESGGGLVQPGGSLRLSCAASGFTFSYYLMNWVRQAPGKGLEWVSS
IGSSGGFTYYADSVKGRFTISRDNSKNTLYLQMNSLRAEDTATYYCASND
YGYYYGMDVWGQGTTVTVSS
EVQLLESGGGLVQPGGSLRLSCAASGFTFSRYNMVWVRQAPGKGLEWVSS
ISSSGGRTKYADSVKGRFTISRDNSKNTLYLQMNSLRAEDTAVYYCVTLD
LGYYYGMDVWGQGTTVTVSS
EVQLLESGGGLVQPGGSLRLSCAASGFTFSSYDMTWVRQAPGKGLEWVSG
IVSSGGLTAYADSVKGRFTISRDNSKNTLYLQMNSLRAEDTAVYYCAKFN
ADFWSGYYNLGLDYWGQGTLVTVSS
EVQLLESGGGLVQPGGSLRLSCAASGFTFSYYQMNWVRQAPGKGLEWVSV
ISPSGGITIYADSVKGRFTISRDNSKNTLYLQMNSLRAEDTAVYYCATAN
GYYDSSGYYYKDAFDIWGQGTMVTVSS
EVQLLESGGGLVQPGGSLRLSCAASGFTFSWYGMTWVRQAPGKGLEWVSR
IYSSGGQTMYADSVKGRFTISRDNSKNTLYLQMNSLRAEDTAVYYCAREA
GIAAAGSYYYYYGMDVWGQGTTVTVSS
EVQLLESGGGLVQPGGSLRLSCAASGFTFSHYWMHWVRQAPGKGLEWVSS
ISSSGGMTYYADSVKGRFTISRDNSKNTLYLQMNSLRAEDTAVYYCTTAD
YGYYYGMDVWGQGTTVTVSS
EVQLLESGGGLVQPGGSLRLSCAASGFTFSLYWMKWVRQAPGKGLEWVSG
ISPSGGPTDYADSVKGRFTISRDNSKNTLYLQMNSLRAEDTATYYCATGD
TLLWFGELTDYWGQGTLVTVSS
EVQLLESGGGLVQPGGSLRLSCAASGFTFSKYNMMWVRQAPGKGLEWVSY
IWSSGGDTLYADSVKGRFTISRDNSKNTLYLQMNSLRAEDTAVYYCARVG
YGYGGPLYYYYYMDVWGKGTTVTVSS
EVQLLESGGGLVQPGGSLRLSCAASGFTFSFYWMAWVRQAPGKGLEWVSS
IGPSGGATDYADSVKGRFTISRDNSKNTLYLQMNSLRAEDTAVYYCARTN
YYDRGGSFDIWGQGTMVTVSS
EVQLLESGGGLVQPGGSLRLSCAASGFTFSQYDMQWVRQAPGKGLEWVSR
IGPSGGNTGYADSVKGRFTISRDNSKNTLYLQMNSLRAEDTAMYYCARIN
VYYDSSGYYYGMDVWGQGTTVTVSS
EVQLLESGGGLVQPGGSLRLSCAASGFTFSHYSMSWVRQAPGKGLEWVSV
IYPSGGETDYADSVKGRFTISRDNSKNTLYLQMNSLRAEDTAVYYCTRDQ
GVDYGDYYFYYYYGMDVWGQGTTVTVSS
EVQLLESGGGLVQPGGSLRLSCAASGFTFSWYWMWVRQAPGKGLEWVSSI
RPSGGFTKYADSVKGRFTISRDNSKNTLYLQMNSLRAEDTAVYYCAAVGW
KGISTGLDYYYYYMDVWGKGTTVTVSS
EVQLLESGGGLVQPGGSLRLSCAASGFTFSAYEMIWVRQAPGKGLEWVSY
IYSSGGWTSYADSVKGRFTISRDNSKNTLYLQMNSLRAEDTATYYCARRG
LHYDSSGYYLGDYFDYWGQGTLVTVSS
EVQLLESGGGLVQPGGSLRLSCAASGFTFSSYHMDWVRQAPGKGLEWVSS
ISSSGGDTYYADSVKGRFTISRDNSKNTLYLQMNSLRAEDTAVYYCAKGL
NYYDSNDYYEVPYYYYGMDVWGQGTTVTVSS
EVQLLESGGGLVQPGGSLRLSCAASGFTFSEYAMVWVRQAPGKGLEWVSS
IVPSGGTTQYADSVKGRFTISRDNSKNTLYLQMNSLRAEDTAVYYCARVN
VHYDILTGYYAYYYYYGMDVWGQGTTVTVSS
EVQLLESGGGLVQPGGSLRLSCAASGETFSDYPMQWVRQAPGKGLEWVSS
IGSSGGFTQYADYVKGRFTISRDNSKNTLYLQMNSLRAEDTAVYYCAKGS
QDYDSSGYYYYYMDVWGKGTTVTVSS
EVQLLESGGGLVQPGGSLRLSCAASGFTFSAYEMIWVRQAPGKGLEWVSY
IYSSGGWTSYADSVKGRFTISRDNSKNTLYLQMNSLRAEDTATYYCARRG
LHYDSSGYYLGDYFDYWGQGTLVTVSS
EVQLLESGGGLVQPGGSLRLSCAASGFTFSHYTMDWVRQAPGKGLEWVSS
IGPSGGITGYADSVKGRFTISRDNSKNTLYLQMNSLRAEDTATYYCATSS
GWYWDYFDYWGQGTLVTVSS
EVQLLESGGGLVQPGGSLRLSCAASGFTFSKYMNHWVRQAPGKGLEWVSW
IWPSGGVTMYADSVKGRFTISRDNSKNTLYLQMNSLRAEDTAVYYCARWG
HYGGNDYWGQGTLVTVSS
EVQLLESGGGLVQPGGSLRLSCAASGFTFSFYSMGWVRQAPGKGLEWVSS
ISSSGGYTDYADSVKGRFTISRDNSKNTLYLQMNSLRAEDTAVYYCAREF
SSWYSYMDVWGKGTTVTVSS
EVQLLESGGGLVQPGGSLRLSCAASGFTFSRYHMSWVRQAPGKGLEWVSS
IRSSGGSTPYADSVKGRFTISRDNSKNTLYLQMNSLRAEDTAVYYCARGP
QLSTFDIWGQGTMVTVSS
EVQLLESGGGLVQPGGSLRLSCAASGFTFSKYEMIWVRQAPGKGLEWVSS
IYPSGGHTQYADSVKGRFTISRDNSNTLYLQMNSLRAEDTAVYYCARGFY
GDYDYYYYYGMDVWGQGTTVTVSS
EVQLLESGGGLVQPGGSLRLSCAASGFTFSWYEMYWVRQAPGKGLEWVSW
IGPSGGFTHYADSVKGRFTISRDNSKNTLYLQMNSLRAEDTALYYCATRG
YSYDFEGWYFDLWGRGTLVTVSS
EVQLLESGGGLVQPGGSLRLSCAASGFTFSDYKMQWVRQAPGKGLEWVSV
ISSSGGHTAYADSVKGRFTISRDNSKNTLYLQMNSLRAEDTAVYYCARET
YYYDSSGYYGGAFDIWGQGTMVTVSS
EVQLLESGGGLVQPGGSLRLSCAASGFTFSNYMMLWVRQAPGKGLEWVSS
IWSSGGYTEYADSVKGRFTISRDNSKNTLYLQMNSLRAEDTAVYYCARGD
MTTVVRNAFDIWGQGTMVTVSS
EVQLLESGGGLVQPGGSLRLSCAASGFTFSGYGMWWVRQAPGKGLEWVSS
IGSSGGFTVYADSVKGRFTISRDNSKNTLYLQMNSLRAEDTAMYYCARGY
HYYDSSGYYYGFEAFDIWGQGTMVTVSS
EVQLLESGGGLVQPGGSLRLSCAASGFTFSGYDMAWVRQAPGKGLEWVSS
IGPSGGGTMYADSVKGRFTISRDNSKNTLYLQMNSLRAEDTAMYYCARRM
ESYYDSYDYWGQGTLVTVSS
EVQLLESGGGLVQPGGSLRLSCAASGFTFSWYDMRWVRQAPGKGLEWVSS
ISPSGGVTTYADSVKGRFTISRDNSKNTLYLQMNSLRAEDTAVYYCTTDE
LSWDGDPYYMDVWGKGTTVTVSS
EVQLLESGGGLVQPGGSLRLSCAASGFTFSVYDMIWVRQAPGKGLEWVSY
ISSSGGGTEYADSVKGRFTISRDNSKNTLYLQMNSLRAEDTAVYYCARGG
SYYETAFDIWGQGTMVTVSS
EVQLLESGGGLVQPGGSLRLSCAASGFTFSNYVMSWVRQAPGKGLEWVSS
IGSSGGETAYADSVKGRFTISRDNSKNTLYLQMNSLRAEDTAVYYCATVY
SYDNSGRLYSFYSFYSWGQGTLVTVSS
EVQLLESGGGLVQPGGSLRLSCAASGFTFSYYNMMWVRQAPGKGLEWVSS
ISSSGGGTDYADSVKGRFTISRDNSKNTLYLQMNSLRAEDTAVYYCTRLG
QWSSGQYYFDYWGQGTLVTVSS
EVQLLESGGGLVQPGGSLRLSCAASGFTFSYYYMVWVRQAPGKGLEWVSS
IGSSGGDTLYADSVKGRFTISRDNSKNTLYLQMNSLRAEDTAVYYCARVI
DSWATAFDIWGQGTMVTVSS
EVQLLESGGGLVQPGGSLRLSCAASGFTFSEYQMGWVRQAPGKGLEWVSS
IVPSGGLTKYADSVKGRFTISRDNSKNTLYLQMNSLRAEDTAVYYCARGS
GYYKDSHFDYWGQGTLVTVSS
EVQLLESGGGLVQPGGSLRLSCAASGFTFSAYEMIWVRQAPGKGLEWVSY
IYSSGGWTSYADSVKGRFTISRDNSKNTLYLQMNSLRAEDTATYYCARRG
LHYDSSGYYLGDYFDYWGQGTLVTVSS
EVQLLESGGGLVQPGGSLRLSCAASGFTFSIYEMEWVRQAPGKGLEWVSV
ISPSGGGTDYADSVKGRFTISRDNSKNTLYLQMNSLRAEDTATYYCARVR
WDDFWTGYYYGMDVWGQGTTVTVSS
EVQLLESGGGLVQPGGSLRLSCAASGFTFSNYAMQWVRQAPGKGLEWVSS
IWPSGGLTDYADSVKGRFTISRDNSKNTLYLQMNSLRAEDTAVYYCAREG
ISYDAFDIWGQGTMVTVSS
EVQLLESGGGLVQPGGSLRLSCAASGETFSQYTMAWVRQAPGKGLEWVSG
IYSSGGGTHYADSVKGRFTISRDNSKNTLYLQMNSLRAEDTAVYYCARGG
GSSWYFGDAFDIWGQGTMVTVSS
EVQLLESGGGLVQPGGSLRLSCAASGFTFSAYAMYWVRQAPGKGLEWVSG
ISPSGGGTEYADSVKGRFTISRDNSKNTLYLQMNSLRAEDTAVYYCAREA
HYYDSSGYYSGAFDIWGQGTMVTVSS
EVQLLESGGGLVQPGGSLRLSCAASGFTFSLYYMVWVRQAPGKGLEWVSG
IYPSGGVTSYADSVKGRFTISRDNSKNTLYLQMNSLRAEDTAVYYCTTAN
GYYDSSGYYYKDAFDIWGQGTMVTVSS
EVQLLESGGGLVQPGGSLRLSCAASGFTFSAYEMRWVRQAPGKGLEWVSR
IGPSGGNTQYADSVKGRFTISRDNSKNTLYLQMNSLRAEDTAVYYCTAAD
YGDYYGMDVWGQGTTVTVSS
EVQLLESGGGLVQPGGSLRLSCAASGFTFSMYDMGWVRQAPGKGLEWVSY
IGSSGGMTTYADSVKGRFTISRDNSKNTLYLQMNSLRAEDTAVYYCARRM
ESYYDSYDYWGQGTLVTVSS
EVQLLESGGGLVQPGGSLRLSCAASGFTFSSYMMWVRQAPGKGLEWVSYI
SPSGGTTSYADSVKGRFTISRDNSKNTLYLQMNSLRAEDTAVYYCAHSWG
SRFDPWGQGTLVTVSS
EVQLLESGGGLVQPGGSLRLSCAASGFTFSYYQMMWVRQAPGKGLEWVSS
IGPSGLTEYADSVKGRFTISRDNSKNTLYLQMNSLRAEDTAVYYCARDGA
TYYDFWDYWGQGTLVTVSS
EVQLLESGGGLVQPGGSLRLSCAASGFTFSPYAMYWVRQAPGKGLEWVSS
IWPSGGSTNYADSVKGRFTISRDNSKNTLYLQMNSLRAEDTAVYYCARES
EIDAFDIWGQGTMVTVSS
EVQLLESGGGLVQPGGSLRLSCAASGFTFSAYEMIWVRQAPGKGLEWVSY
IYSSGGWTSYADSVKGRFTISRDNSKNTLYLQMNSLRAEDTATYYCARRG
LHYDSSGYYLGDYFDYWGQGTLVTVSS
EVQLLESGGGLVQPGGSLRLSCAASGFTFSWYYMAWVRQAPGKGLEWVSV
IGPSGGDTKYADSVKGRFTISRDNSKNTLYLQMNSLRAEDTAVYYCTRVS
PLDYYDSSGYYFGYYYYYGMDVWGQGTTVTVSS
EVQLLESGGGLVQPGGSLRLSCAASGFTFSAYEMIWVRQAPGKGLEWVSY
IYSSGGWTSYADSVKGRFTISRDNSKNTLYLQMNSLRAEDTATYYCARRG
LHYDSSGYYLGDYFDYWGQGTLVTVSS
EVQLLESGGGLVQPGGSLRLSCAASGFTFSFYGMGWVRQAPGKGLEWVSW
ISSSGGDTYYADSVKGRFTISRDNSKNTLYLQMNSLRAEDTAVYYCARDR
DNWNDAADYWGQGTLVTVSS
EVQLLESGGGLVQPGGSLRLSCAASGFTFSLYPMSWVRQAPGKGLEWVSS
ISSSGGHTKYADSVKGRFTISRDNSKNTLYLQMNSLRAEDTAVYYCALYS
YYYGMDVWGQGTTVTVSS
EVQLLESGGGLVQPGGSLRLSCAASGFTFSVYGMNWVRQAPGKGLEWVSY
ISPSGGTYYADSVKGRFTISRDNSKNTLYLQMNSLRAEDTAVYYCARGGY
YSNSLDFYYYYYGMDVWGQGTTVTVSS
EVQLLESGGGLVQPGGSLRLSCAASGFTFSNYAMQWVRQAPGKGLEWVSY
IGPSGGETGYADSVKGRFTISRDNSKNTLYLQMNSLRAEDTAVYYCARDL
RGNYYDSSGYTDAFDIWGQGTMVTVSS

### 2. MMP12 Inhibitors

| | |
|---|---|
| 539A-M0013-D11 | QDIQMTQSPSSLSASVGDRITISCQASQDIDNYLNW |
| | YQQRSGKAPKLLIYDAYNLKAGVPSRFRGSRSGTDF |
| | FLTISSLQPEDFATYYCQQSYRAPLTFGGGTKVEIK |
| 539A-M0013-G12 | QDIQMTQSPSSLSASVGDRVTITCQASQDTYNRLHW |
| | YQQKPGKAPKLLIYDAVNLNRGVPSRFRGSGSGTNY |
| | ILIITNLQPEDTATYYCQHSDDLSLAFGGGTKVEIK |
| 539A-M0013-H06 | QDIQMTQSPATLSLSPGERATLSCRASHSVDNLAWY |
| | QQQPGQAPRLLIYDVSYRATGIPARFSGSGSGTDFT |
| | LTISSLEPEDFAVYYCQQRNNWPLSLTFGGGTKVEI |
| | K |
| 539A-M0014-C09 | QDIQMTQSPATLSLSPGERATLSCGASQNIDGYYLA |
| | WYQQKPGQAPSLLIYDASSRSTGVPDRFSGSGSGTD |
| | FTLTISRLEPEDFAVYYCQHYGNSLWTFGQGTKVEI |
| | K |
| 539A-M0014-G11 | QYELTQPPSASGTPGQRITISCSGSSSNLGSNPVQW |
| | YQQLPGSAPKLLIHTNTHRPSGVPDRFSGSKSVTSA |
| | SLAISGLQSEDEAEYYCATWDDSLNGGVFGGGTKLT |
| | VL |
| 539A-M0016-A11 | QDIQMTQSPSSLSASVRDRVTITCRTSQNINTYLNW |
| | YYQAPGRAPKLLIFGVSSLHRGVSSRFSGSGDGTEF |
| | TLTISSLQPEDIGTYFCQQSYSSPWTFGQGTKVEIK |
| 539A-M0016-H05 | QDIQMTQSPATLSLSPGERATLSCRASQSVSSYLAW |
| | YQQKPGQAPRLLIYDASNRATGIPARFSGSGSGTDF |
| | TLTISSLEPEDFAVYYCQQRSNWPLTFGGGTKVEIK |
| 539A-M0019-C05 | QYELTQPRSVSGSPGQSVTISCTGSSSDVAGFYYVS |
| | WYQQHPGKAPKLMIRDVNDRPSGVSNRFSGSKSGNT |
| | ASLTIAGLQTEDEAVYYCSSTSRSDTRVIFGGGTKL |
| | TV |
| 539A-M0020-B01 | QYELTQPPSVSVAPGQTATITCEGNNIASKSVHWYQ |
| | QKPGQAPVLVVYDDRDRPSGISERISGSNSGNTPTL |
| | TIFRVEAGDEADYYCQVSDSATDHRVFGGGTKLTVL |
| 539A-M0022-C07 | QDIQMTQSPATLSVSPGERATLSCRASQNVRNYLAW |
| | YQQKPGQAPRLLIYDASKRATGIPARFSGSGSGTDF |
| | TLTISGLEPEDFAVYYCQQRSNWPTFGPGTKVDIK |
| 539A-M0025-D04 | QDIQMTQSPGTLSLSPGERATLSCRASQSVSSSYLA |
| | WYQQKPGQAPRLLIYGASSRATGIPDRFSGSGSGTD |
| | FTLTISRLEPEDFAVYYCQQYGSSLTFGGGTKVEIK |
| 539A-M0027-E11 | QDIQMTQSPDTLSLSPGERGTLSCRASQSLSSSYLA |
| | WYQQKPGQAPRLLIYDASSRATGIPDRFSGSGSGTD |
| | FTLTIGRLEPEDSAVYYCQQYGSFPLTFGGGTKVEI |
| | K |

[0481] 2. MMP12 Inhibitors Heavy Chain Sequences (provided in the same roder as the light chains provided above)

EVQLLESGGGLVQPGGSLRLSCAASGFTFSSYPMWWVRQAPGKGLEWVSGIVPSGGV
TIYADSVKGRFTISRDNSKNTLYLQMNSLRAEDTAVYYCARVGMLASSDYYYYMDVWGKGTTVTVSS
EVQLLESGGGLVQPGGSLRLSCAASGFTFSWYHMFWVRQAPGKGLEWVSGISSSGGYTHYADSVKGRF
TISRDNSKNTLYLQMNSLRAEDTAVYYCATREGMLYDYVWGENYMDVWGKGTTVTVSS
EVQLLESGGGLVQPGGSLRLSCAASGFTFSAYEMDWVRQAPGKGLEWVSGISSSGGPTYYADSVKGRF
TISRDNSKNTLYLQMNSLRAEDTAVYYCARVGGWELLQDYYYYMDVWGKGTTVTVSS
EVQLLESGGGLVQPGGSLRLSCAASGFTFSDYSMHWVRQAPGKGLEWVSGIGPSGGPTFYADSVKGRF
TISRDNSKNTLYLQMNSLRAEDTAVYYCARGEYSSSDYYYYYGMDVWGQGTTVTVSS
EVQLLESGGGLVQPGGSLRLSCAASGFTFSWYVMVWVRQAPGKGLEWVSSIYSSGGPTKYADSVKGRF
TISRDNSKNTLYLQMNSLRAEDTAVYYCAKEGGVYGGPELYYYYYGMDVWGQGTTVTVSS
EVQLLESGGGLVQPGGSLRLSCAASGFTFSEYQMAWVRQAPGKGLEWVSSIYPSGGHTHYADSVKGRF
TISRDNSKNTLYLQMNSLRAEDTAVYYCAKESYYDFWSGYYFDYWGQGTLVTVSS
EVQLLESGGGLVQPGGSLRLSCAASGFTFSWYAMSWVRQAPGKGLEWVSRIVPSGGDTGYADSVKGRF
TISRDNSKNTLYLQMNSLRAEDTAVYYCATFRGIMYGDYGSSYWYFDLWGRGTLVTVSS
EVQLLESGGGLVQPGGSLRLSCAASGFTFSWYAMVWVRQAPGKGLEWVSYIGSSGGVTGYADSVKGRF
TISRDNSKNTLYLQMNSLRAEDTAVYYCARQKRVDYYDSSGYPTNAEFDYWGQGTLVTVSS
EVQLLESGGGLVQPGGSLRLSCAASGFTFSHYVMHWVRQAPGKGLEWVSYIGSSGGETRYADSVKGRF
TISRDNSKNTLYLQMNSLRAEDTAVYYCARADYGDYDYYYYYGMDVWGQGTTVTVSS
EVQLLESGGGLVQPGGSLRLSCAASGFTFSIYQMWWVRQAPGKGLEWVSSISSSGFTWYADSVKGRF
TISRDNSKNTLYLQMNSLRAEDTAVYYCTTEDIGYYYGMDVWGQGTTVTVSS
EVQLLESGGGLVQPGGSLRLSCAASGFTFSSYGMHWVRQAPGKGLEWVSGIVSSGGSTIYADSVKGRF
TISRDNSKNTLYLQMNSLRAEDTAVYYCTTYDYGDHYGMDVWGQGTTVTVSS
EVQLLESGGGLVQPGGSLRLSCAASGFTFSHYEMEWVRQAPGKGLEWVSSISSSGGPTMYADSVKGRF
TISRDNSKNTLYLQMNSLRAEDTAVYYCARGMYGDYDFYYYYGMDVWGQGTTVTVSS

[0482] 1. MMP-12 Inhibitors-Light Chain

| Initial Name | LV-FR1 | LV-CDR1 | LV-FR2 | LV-CDR2 | LV-FR3 | LV-CDR3 | LV-FR4 | L-Constant |
|---|---|---|---|---|---|---|---|---|
| 539B-M0035-C05 | QSELTQPASVSGSPGQSITISC | TGTSSDVGGYNYLS | WYQQHPGKAPKLMIY | EVTNRPS | GVSNRFSGSKSGNTASLTISGLQA | SSYTSTTTLL | FGGGTKLTVL | GQPKAAP |
| | | | | | EDEADYYC | | | |
| 539B-M0040-A02 | QDIQMTQSPATLSLSPGERATLSC | RASQSVSSSYLA | WYQQKPGQAPRLLIY | GASSRAT | GIPDRFSGSGSGTDFTLTISRLEP | QQYGSSPLT | FGGGTKVEIK | RTVAAPS |
| | | | | | EDFAVYYC | | | |
| 539B-M0041-G04 | QYELTQPASVSGSPGQSITISC | TGTSSDVGGYNYVS | WYQQHPGKAPKLMIY | EVSNRPS | GVSNRFSGSKSGNTASLTISGLQA | SSYTSSSTLFR | FGGGTKLTVL | GQPKAAP |
| | | | | | EDEADYYC | | | |
| 539B- | QDIQMTQSPSSLS | RASQRIASYLN | WYQQKPGKAPKLLIY | AASSLQS | GVPSRFSGSGSGTDFTLTVSSLQP | QQSYSAPLT | FGGGTKVEIK | RTVAAPS |
| M0007- | ASVGDRVTITC | | | | EDFATYYC | | | |
| A10 | | | | | | | | |
| 539B- | QDIQMTQSPSSLS | RTSENVERYLN | WYQHRPGKSPRLVIY | DASKLQT | GVPSRFTGRGSGTDFTLTINSLQP | QQTSITPHT | FGQGTKLDVK | RTVAAPS |
| M0052- | ASVGDRVTLTC | | | | EDFATYYC | | | |
| F03 | | | | | | | | |
| 539B- | QDIQMTQSPLSLP | RSSQSLLHDNGYNYLD | WYLQKPGQSPQLLIY | LGSNRAS | GVPDRFSGSGSGTDFTLKISRVEA | MQGLQTPLT | FGGGTKVEIK | RTVSAPS |
| M0041- | VTPGEPASISC | | | | EDVGVYYC | | | |
| A05 | | | | | | | | |
| 539B- | QDIQMTQSPSSLS | RASQNINSYLN | WYQQKVGKAPKLLIF | GAYTLHS | GAPSRFSGSGSGTDFTLTISSLQP | QQTYTSYS | FAQGTKLEIK | AAPSVFI |
| M0034- | ASVGDRVSITC | | | | EDVATYYC | | | |
| C04 | | | | | | | | |
| 539B- | QSVLTQPPSASGT | SGTSPNIGSNTVS | WYQQLPGTAPKLLIY | NNNQRPS | GVPDRFSGSKSGTSASLAISGLQS | VAWDDSLNGFV | LGTGTKVTVL | GQPKANP |
| M0038- | PGQRVTISC | | | | EDEADYYC | | | |
| D06 | | | | | | | | |
| 539B- | QDIQMTQSPGTLS | RASQSVSSNYLA | WYQQKRGQAPRLLIY | GASSRAT | GVPGRFSGSGSGTDFTLTISRLEP | QQYGSSPRT | FGQGTKLEIK | RTVAAPS |
| M0007- | LSSGERATLSC | | | | EDFAVYYC | | | |
| H06 | | | | | | | | |
| 539B- | QSELTQPPSASGT | SGSSSNIGSNTVN | WYQQLPGTAPKLLIY | SNNQRPS | GVPDRFSGSKSGTSASLAISGLQS | AAWDDSLNGRWV | FGGGTKLTVL | GQPKAAP |
| M0038- | PGQRVTISC | | | | EDEADYYC | | | |
| A03 | | | | | | | | |
| 539B- | QYELTQPASVSGS | TGTNSDIGDYNFVS | WYQQHPGKAPKLMIS | EVSNRPS | GVSNRFSGSKSGNTASLSISGLQA | SSYTSSSTPVV | FGGGTKLTVL | GQPKAAP |
| M0039- | PGQSITISC | | | | EDEAHYYC | | | |
| B02 | | | | | | | | |
| 539B- | QSALTQSSSASAS | TLSSGHGDYIIA | WHQQQPGKAPRYLM | KLENSGSFKKGS | GVPDRFSGSSSGADRYLTISDLQS | ETWDSNIRLV | FGGGTKLTVL | SQPKAAP |
| M0035- | LGSSVTLTC | | | | DDEADYYC | | | |
| D06 | | | | | | | | |
| 539B- | QDIQMTQSPSSLS | RASQSIDTYLN | WYQQKPGKAPKLLIY | AASKLED | GVPSRFSGSGTGTDFTLTIRSLQP | QQSYSSPGIT | FGPGTKVEIK | RTVAAPS |
| M0042- | ASVGDRVAITC | | | | EDFASYFC | | | |
| H01 | | | | | | | | |
| 539B- | QSALTQSSSASAS | TLSSGHGDYIIA | WHQQQPGKAPRYLM | KLENSGSFKKGS | GVPDRFSGSSSGADRYLTISDLQS | ETWDSNIRLV | FGGGTKLTVL | SQPKAAP |
| M0040- | LGSSVTLTC | | | | DDEADYYC | | | |
| C08 | | | | | | | | |
| 539B-M0038-F09 | QDIQMTQSPDSLS | RASQSISTYLN | WYQQKPGKAPKLLIY | AASSLQS | GVPSRFSGSGSGTDFTLTISSLQP | QQSYSTPLT | FGGGTKVEIK | RTVAAPS |
| | ASVGDRVTITC | | | | EDFATYYC | | | |
| 539B-M0040-E08 | QSALTQPASVSGS | TGTSSDVGGYNYVS | WYQQHPGKTPKLMIY | DVSNRPS | GVSNRFSGSKSGNTASLTISGLQA | SSYTSSSTLV | FGGGTKLTVL | GQPKAAP |
| | PGQSITISC | | | | EDEADYYC | | | |
| 539B-M0034-E11 | QDIQMTQSPSSLS | RASQRISSYLN | WYQQKPGKAPKLLIY | AASSLQS | GVPSRFSGSGSGTDFTLTIRSLQP | QQSYSSRWT | FGQGTKVEIQ | RTVAAPS |
| | ASVGDRVTITC | | | | EDFATYYC | | | |
| 539BM0008-E08- | QYELTQPPSLSVS | SGEKLGEKFAS | WYQRRPGQSPLLIIY | QDNKRPS | GIPERFSGSNSGNTAALTITGTQA | QAWESTTAV | FGGGTKLTVL | GQPKANP |
| | PGQTASITC | | | | MDDADYYC | | | |
| 539B-M0039-F01 | QNIQMTQSPSSVS | RASQDINYWLA | WYQQKPGKAPKLLIY | AASSLQS | GVPSRFSGSGSGTDFTLTISSLQP | QRANSFPYT | FGQGTKLEIK | RTVAAPS |
| | ASVGDRVTITC | | | | EDFATYYC | | | |
| 539B-M0030-A10 | QSELTQPASVSGS | TGTSSDVGAYNYVS | WYQQHPGKVPKLMIY | EVSNRPS | GVSNRFSGSKSGNTASLTISGLQA | NSYTTSATLV | FGGGTKLTVL | SQPKAAP |
| | PGQSITISC | | | | EDEADYYC | | | |
| 539B-M0052-E10 | QDIQMTQSPLSLP | RSSQSLLYSNGYNYLD | WYLQKPGQSPQLLIY | LGSNRAS | GVPDRFSGSGSGTDFTLKISRVEA | MQALQTPLT | FGGGTKVEIK | RTVAAPS |
| | VTPGEPASISC | | | | EDVGVYYC | | | |
| 539B- | QYELTQPASVSGS | TGTSSDIGGYNFVS | WYQQHPGRAPKLTIY | EVNNRPS | GVSNRFSGSKSGNTASLTISGLQA | SSYTPSSTLV | FGTGTKVTVL | RQPKANP |
| M0040- | PGQSITISC | | | | EDEADYYC | | | |
| A03 | | | | | | | | |
| 539B- | QSVLTQPPSVSVA | GGNNIGSKTVN | WYQQKTGQAPVLVVH | DDSDRPS | GIPERLSSNSGNTATLTISRVEA | QVWDSGTDHYV | FGTGTKVTVL | GQPKANP |
| M0040- | PGQTARITC | | | | GDEADYYC | | | |
| B05 | | | | | | | | |
| 539B- | QDIQMTQSPSSLS | RASQSISYFLN | WYQQKPGKAPKLLIY | AASTLQG | GVPSRFRGSGSGTDFTLTISSLQP | QHSYSTPPIT | FGPGTKVDIK | RTVAAPS |
| M0041- | ASVGDRVTITC | | | | EDFATYYC | | | |
| G01 | | | | | | | | |
| 539B-M0038-H04 | QSELTQPHSVSES | TSSSGNIASNYVQ | WYQQRPNSAPTIVIY | AYNRRPS | GVPDRFSGSIDSSSNSASLTVSGL | QSYDNINRLWV | FGGGTKLTVL | GQPKAAP |
| | PGTTVTISC | | | | KTEDEADYYC | | | |
| 539B-M0032-H09 | QDIQMTQSPSTLS | RASQSISSWLA | WYQQKPGKAPKLLIY | DASSLES | GVPSRFSGSGSGTEFTLTISSLQP | QQYDHLPT | FGGGTKVQVK | RTVAAPS |
| | ASVGDRVTITC | | | | EDIGTYYC | | | |

[0483] 1. MMP-12 Inhibitors-Heavy Chain Variable Sequences (provided in the same order as the Light Chains provided above)

| HV-FR1 | HV-CDR1 | HV-FR2 | HV-CDR2 | HV-FR3 | HV-CDR3 | HV-FR4 |
|---|---|---|---|---|---|---|
| EVQLLESGGGLVQPGGSLRLSCAASGFTFS | WYPMI | WVRQAPGKGLEWVS | SISSSGAYTHYADSVKG | RFTISRDNSKNTLYLQMNSLRAEDTAVYYCAR | EGVDTAMAFGY | WGQGTLVTVSS |
| EVQLLESGGGLVQPGGSLRLSCAASGFTFS | DYGMM | WVRQAPGKGLEWVS | SISPSGGDTHYADSVKG | RFTISRDNSKNTLYLQMNSLRAEDTAVYYCAR | WEAKVDAFDI | WGQGTTVTVSS |
| EVQLLESGGGLVQPGGSLRLSCAASGFTFS | DYPMS | WVRQAPGKGLEWVS | SISSSGGSTEYADSVKG | RFNISRDNSKNTLYLQMNSLRAEDTAMYYCAR | HPDGVARFDP | WGQGTLVTVSS |
| EVQLLESGGGLVQPGGSLRLSCAASGFTFS | EYAMR | WVRQAPGKGLEWVS | SISPSGGSTWYADSVKG | RFTISRDNSKNTLYLQMNSLRAEDTAVYYCAR | RGWAAAGYYYGMDV | WGQGTTVTVSS |
| EVQLLESGGGLVQPGGSLRLSCAASGFTFS | EYNMH | WVRQAPGKGLEWVS | SISPSGGNTRYADSVKG | RFTISRDNSKNTLYLQMNSLRAEDTAVYYCAR | DGVSKWYYHGIDV | WGQGTTVTVSS |
| EVQLLESGGGLVQPGGSLRLSCAASGFTFS | EYNMN | WVRQAPGKGLEWVS | GISSSGGQTMYADSVKG | RFTISRDNSKNTLYLQMNSLRAEDTAVYYCAR | GVAYDSKTPDI | WGRGTMVTVSS |
| EVQLLESGGGLVQPGGSLRLSCAASGFTFS | EYPMY | WVRQAPGKGLEWVS | VIYPSGGWTDYADSVKG | RFTISRDNSKNTLYLQMNSLRAEDTAVYYCAR | MAVTGGSRFDY | WGQGTLVTVSS |
| EVQLLESGGGLVQPGGSLRLSCAASGFTFS | FYAMT | WVRQAPGKGLEWVS | RIVPSGGDTMYADSVKG | RFTISRDNSKNTLYLQMNSLRAEDTAVYYCAR | DLGDYDFWSGTLYYGMDV | WGQGTTVTVSS |
| EVQLLESGGGLVQPGGSLRLSCAASGFTFS | HYWMH | WVRQAPGKGLEWVS | SISSSGGMTYYADSVKG | RFTISRDNSKNTLYLQMNSLRAEDTAVYYCTT | ADYGYYYGMDV | WGQGTTVTVSS |
| EVQLLESGGGLVQPGGSLRLSCAASGFTFS | IYMMG | WVRQAPGKGLEWVS | SISPSGGWTRYADSVKG | RFTISRDNSKNTLYLQMNSLRAEDTAVYYCTT | APYPNWNYHYFDY | WGQGTLVTVSS |
| EVQLLESGGGLVQPGGSLRLSCAASGFTFS | KYPMV | WVRQAPGKGLEWVS | SIGPSGGVTAYADSVKG | RFTISRDNSKNTLYLQMNSLRAEDTAMYYCAR | HSRDIAVDY | WGQGTLVTVSS |
| EVQLLESGGGLVQPGGSLRLSCAASGFTFS | MYAMV | WVRQAPGKGLEWVS | SISPSGGLTDYADSVKG | RFTISRDNSKNTLYLQMNSLRAEDTATYYCAN | PWPLTAELADI | WGQGTMVTVSS |
| EVQLLESGGGLVQPGGSLRLSCAASGFTFS | MYPMN | WVRQAPGKGLEWVS | RIVSSGGTTHYADSVKG | RFTISRDNSKNTLYLQMNSLRAEDTAVYYCTT | GDYSWDY | WGQGTLVTVSS |
| EVQLLESGGGLVQPGGSLRLSCAASGFTFS | PYDMT | WVRQAPGKGLEWVS | GIVPSGGFTSYADSVKG | RFTISRDNSKNTLYLQMNSLRVEDTAVYYCAR | RGVVGGLDY | WGQGTLVTVSS |
| EVQLLESGGGLVQPGGSLRLSCAASGFTFS | PYIMK | WVRQAPGKGLEWVS | YISSSGGITMYADSVKG | RFTISRDNSKNTLYLQMNSLRAEDTAVYYCAA | ENRVPFDY | WGQGTLVTVSS |
| EVQLLESGGGLVQPGGSLRLSCAASGFTFS | PYSMG | WVRQAPGKGLEWVS | GIGPSGGYTTYADSVKG | RFTISRDNFKNTLYLQMNSLRAEDTAVYYCAR | HPVGYDAFDI | WGQGTMVTVSS |
| EVQLLESGGGLVQPGGSLRLSCAASGFTFS | RYGML | WVRQAPGKGLEWVS | VIYPSGGPTLYADSVKG | RFTISRDNSKNTLYLQMNSLRAEDTAVYYCAR | DGVLRGSHIYFDY | WGQGTLVTVSS |
| EVQLLESGGGLVQPGGSLRLSCAASGFTFS | RYTMG | WVRQAPGKGLEWVS | RIYSSGGNTVYADSVKG | RFTISRDNSKNTLYLQMNSLRAEDTATYYCAR | TRRDGYNPFDY | WGQGTLVTVSS |
| EVQLLESGGGLVQPGGSLRLSCAASGFTFS | RYWMD | WVRQAPGKGLEWVS | GIYPSGGYTLYADSVKG | RFTISRDNSKNTLYLQMNSLRAEDTAVYYCAR | HGDYMDV | WGKGTTVTVSS |
| EVQLLESGGGLVQPGGSLRLSCAASGFTFS | TYPMS | WVRQAPGKGLEWVS | SISPSGGWTRYADSVKG | RFTISRDNSKNTLYLQMNSLRAEDTAVYYCAS | SPYGPDAFDI | WGQGTMVTVSS |
| EVQLLESGGGLVQPGGSLRLSCAASGFTFS | WYKMG | WVRQAPGKGLEWVS | GISSSGGLTFYADSVKG | RFTISRDNSNNTLYLQMNSLRAEDTAVYYCAR | VPAYSSGYGGFDY | WGQGTLVTVSS |
| EVQLLESGGGLVQPGGSLRLSCAASGFTFS | WYPMI | WVRQAPGKGLEWVS | SISSSGGYTHYADSVKG | RFTISRDNSKNTLYLQMNSLRAEDTAVYYCAR | EGVDTAMAFGY | WGQGTLVTVSS |
| EVQLLESGGGLVQPGGSLRLSCAASGFTFS | YYEME | WVRQAPGKGLEWVS | GIYPSGGITTYADSVKG | RFTISRDNSKNTLYLQMNSLRAEDTAVYYCAR | VFFYYDSSGYYAPYFDY | WGQGTLVTVSS |
| EVQLLESGGGLVQPGGSLRLSCAASGFTFS | YYPMA | WVRQAPGKGLEWVS | YISSSGGLTTYADSVKG | RFTISRDNSKNTLYLQMNSLRAEDTAVYYCAR | SPTYYDFWSGYWAGIFDY | WGQGTLVTVSS |
| EVQLLESGGGLVQPGGSLRLSCAASGFTFS | YYPMV | WVRQAPGKGLEWVS | VIYPSGGYTHYADSVKG | RFTISRDNSKNTLYLQMNSLRAEDTAMYYCAR | VGYDSSGYYWGYFDY | WGQGTLVTVSS |
| EVQLLESGGGLVQPGGSLRLSCAASGFTFV | YHMQ | WVRQAPGKGLEWVS | GISPSGGLTDYADSVKG | RFTISRDNSKNTLYLQMNSLRAEDTAVYYCAH | GTDPLTY | WGQGTLVTVSS |

[0484] 2. MMP-12 Inhibitors-Light Chain Variable Region

| | | | | |
|---|---|---|---|---|
| Initial Name | LV-FR1 | LV-CDR1 | LV-FR2 | LV-CDR2 |

| | | | | |
|---|---|---|---|---|
| 539BM0034-C04- | QDIQMTQSPSSLSASVGDRVSITC | RASQNINSYLN | WYQQKVGKAPKLLIF | GAYTLHS |
| 539B-M0039-F01 | QNIQMTQSPSSVSASVGDRVTITC | RASQDINYWLA | WYQQKPGKAPKLLIY | AASSLQS |
| 539B-M0041-B05 | QDIQMTQSPSSLSASVGDRVSITC | RASQNINSYLN | WYQQKVGKAPKLLIF | GAYTLHS |
| 539B-M0041-G01 | QDIQMTQSPSSLSASVGDRVTITC | RASQSISYFLN | WYQQKPGKAPKLLIY | AASTLQG |
| 539B-M0042-B06 | QDIQMTQSPDTLSLSPGERATLSC | RASQTISSTFLA | WYQQKPGQAPRLLIY | GASTRAA |
| 539B-M0006-B10 | QDIQMTQSPGTLSLSPGERATLSC | RASQSVSSSYLA | WYQQKPGQAPRLLIY | GASSRAT |
| 539B-M0007-H06 | QDIQMTQSPGTLSLSSGERATLSC | RASQSVSSNYLA | WYQQKRGQAPRLLIY | GASSRAT |
| 539B-M0008-H09 | QDIQMTQSPSSLSASVGDRVTITC | RANQSIYTYLN | WYQQKPGKAPELLIY | AASSLQS |
| 539B-M0009-H08 | QYELTQPPALSVAPGETATITC | GGDKIGRKSVN | WYQQKAGQAPVLVIF | YDNDRPS |
| 539B-M0011-H11 | QSALTQPPSVSVAPGQTARITC | GGNNIGTKSVH | WYQQKSGQAPVLVVY | DNSDRPS |
| 539B-M0015-F02 | QDIQMTQSPGTLSLSPGERATLSC | RASQSVSSSYLA | WYQQKPGQAPRLLIY | GASSRAT |
| 539B-M0016-D01 | QSELTQPPSVSVSPGQTATITC | SGDVSVHKSFC | WYQQRPGQSPVLVIY | QIDKRPS |

| | | | | |
|---|---|---|---|---|
| Initial Name | LV-FR3 | LV-CDR3 | LV-FR4 | L-Constant |

| | | | | |
|---|---|---|---|---|
| 539BM0034-C04- | GAPSRFSGSGSGTDFTLTISSLQPEDVATYYC | QQTYTSYS | FAQGTKLEIK | AAPSVFI |
| 539B-M0039-F01 | GVPSRFSGSGSGTDFTLTISSLQPEDFATYYC | QRANSFPYT | FGQGTKLEIK | RTVAAPS |
| 539B-M0041-B05 | GAPSRFSGSGSGTDFTLTISSLQPEDVATYYC | QQTYTSYS | FAQGTKLEIK | AAPSVFI |
| 539B-M0041-G01 | GVPSRFRGSGSGTDFTLTISSLQPEDFATYYC | QHSYSTPPIT | FGPGTKVDIK | RTVAAPS |
| 539B-M0042-B06 | GIPDRFIGSGSGTDFTLTISSLEPEDSAVYYC | QQYDRSPT | FGGGTKVEIK | RTVAAPS |
| 539B-M0006-B10 | GIPDRFSGSGSGTDFTLTISRLEPEDFAVYYC | QQYGSSPRT | FGQGTKLEIK | RTVAAPS |
| 539B-M0007-H06 | GVPGRFSGSGSGTDFTLTISRLEPEDFAVYYC | QQYGSSPRT | FGQGTKLEIK | RTVAAPS |
| 539B-M0008-H09 | GVPSRFSGSGSGTDFTLTISSLQPEDFATYYC | QQAGI | FGQGTKLEIK | RTVAAPS |
| 539B-M0009-H08 | GITGRFSGSNSGNSATLTISRVEAGDEADFYC | QVWGPNDFPL | FGGGTKLTVL | GQPKAAP |
| 539B-M0011-H11 | GIPERFSGSNSGNTATLTISRVEAGDEADYYC | QVWDNSIDHVV | FGGGTKLTVL | GQPKAAP |
| 539B-M0015-F02 | GIPDRFSGSGSGTDFTLTISRLEPEDFAVYYC | QQYGSSPPIT | FGQGTRLEIK | RTVAAPS |
| 539B-M0016-D01 | GVPERFSGSISGTTATLTISGTQATDEADYYC | QGWDSTTYYV | FGTGTKVTVL | SQPKANP |

[0485] 1. MMP-12 Inhibitors Heavy Chain Variable Region Sequences (in the same order as the light chains provided above)

| | | | |
|---|---|---|---|
| HV-FR1 | HV-CDR1 | HV-FR2 | HV-CDR2 |

| | | | |
|---|---|---|---|
| EVQLLESGGGLVQPGGSLRLSCAASGFTFS | DYNMH | WVRQAPGKGLEWVS | YIGPSGGYTHYADSVKG |
| EVQLLESGGGLVQPGGSLRLSCAASGFTFS | EYPMY | WVRQAPGKGLEWVS | VIYPSGGWTDYADSVKG |
| EVQLLESGGGLVQPGGSLRLSCAASGFTFS | RYWMD | WVRQAPGKGLEWVS | GIYPSGGYTLYADSVKG |
| EVQLLESGGGLVQPGGSLRLSCAASGFTFS | EYPMY | WVRQAPGKGLEWVS | VIYPSGGWTDYADSVKG |
| EVQLLESGGGLVQPGGSLRLSCAASGFTFS | YYPMA | WVRQAPGKGLEWVS | YISSSGGLTTYADSVKG |
| EVQLLESGGGLVQPGGSLRLSCAASGFTFS | FYHME | WVRQAPGKGLEWVS | SISPSGGHTDYADSVKG |
| EVQLLESGGGLVQPGGSLRLSCAASGFTFS | SYGMH | WVRQAPGKGLEWVS | GIVSSGGSTIYADSVKG |
| EVQLLESGGGLVQPGGSLRLSCAASGFTFS | HYWMH | WVRQAPGKGLEWVS | SISSSGGMTYYADSVKG |
| EVQLLESGGGLVQPGGSLRLSCAASGFTFS | DYNMH | WVRQAPGKGLEWVS | YIGPSGGYTHYADSVKG |
| EVQLLESGGGLVQPGGSLRLSCAASGFTFS | MYWMF | WVRQAPGKGLEWVS | SISSSGGHTFYADSVKG |
| EVQLLESGGGLVQPGGSLRLSCAASGFTFS | WYNMW | WVRQAPGKGLEWVS | YIYPSGGNTGYADSVKG |
| EVQLLESGGGLVQPGGSLRLSCAASGFTFS | RYGMT | WVRQAPGKGLEWVS | GISPSGGNTWYADSVKG |
| EVQLLESGGGLVQPGGSLRLSCAASGFTFS | EYNMP | WVRQAPGKGLEWVS | YIYSSGGSTEYADSVKG |

| | | |
|---|---|---|
| HV-FR3 | HV-CDR3 | HV-FR4 |

| | | |
|---|---|---|
| RFTISRDNSKNTLYLQMNSLRAEDTAVYYCAK | DIRGAYSSGLFDY | WGRGTLVTVSS |
| RFTISRDNSKNTLYLQMNSLRAEDTAVYYCAR | MAVTGGSRFDY | WGQGTLVTVSS |
| RFTISRDNSKNTLYLQMNSLRAEDTAVYYCAR | HGDYMDV | WGKGTTVTVSS |
| RFTISRDNSKNTLYLQMNSLRAEDTAVYYCAR | MAVTGGSRFDY | WGQGTLVTVSS |
| RFTISRDNSKNTLYLQMNSLRAEDTAVYYCAR | SPTYYDFWSGYWAGIFDY | WGQGTLVTVSS |
| RFTISRDNSKNTLYLQMNSLRAEDTAVYYCAS | LLSGT | WGQGTLVTVSS |
| RFTISRDNSKNTLYLQMNSLRAEDTAVYYCTT | YDYGDHYGMDV | WGQGTTVTVSS |
| RFTISRDNSKNTLYLQMNSLRAEDTAVYYCTT | ADYGYYYGMDV | WGQGTTVTVSS |
| RFTISRDNSKNTLYLQMNSLRAEDTAVYYCAK | DIRGAYSSGLFDY | WGRGTLVTVSS |
| RFTISRDNSKNTLYLQMNSLRAEDTAVYYCAR | GSYSGYDPFDY | WGRGTLVTVSS |
| RFTISRDNSKNTLYLQMNSLRAEDTAVYYCAV | FEYSSSGPQGY | WGQGTLVTVSS |
| RFTISRDNSKNTLYLQMNSLRAEDTAVYYCTS | HDYGDHYGMDV | WGQGTLVTVSS |
| RFTISRDNSKNTLYLQMNSLRAEDMAVYYCAK | DLWEDSSTWGYGMDV | WGQGTTVTVSS |

[0486] 2. MMP-12 Inhibitors Heavy Chain FR4 & Constant Region Sequences (in the same order as the light chains provided above)

HV-FR4
WGRGTLVTVSS
WGQGTLVTVSS
WGKGTTVTVSS
WGQGTLVTVSS
WGQGTLVTVSS
WGQGTLVTVSS
WGQGTTVTVSS
WGQGTTVTVSS
WGRGTLVTVSS
WGRGTLVTVSS
WGQGTLVTVSS
WGQGTLVTVSS
WGQGTTVTVSS

### Example 6

### Additional MMP-12 Binding Proteins

[0487] Twenty-one additional mutants were prepared:

[0488] Eighteen mutants of DX-2712 were made by changing residues in the CDR1 and 2 of the HC of DX-2712.

[0489] A residue in the light chain of each of DX-2712, M0121-E07, and M0008-H09 (the parental antibody) was glycosylated.

[0490] 18 mutants of DX-2712:

| | Heavy/Light Chain Mutations |
|---|---|
| | HC Mutant 539B-X41-B01: |
| Clone: | LC is 539B-X40-A01 (S25) |
| 539B-X0041-A01 | W31D; M56Y; M58H |
| 539B-X0041-B01 | W31D; M56Y; M58H; V97R; P99A; A102S |
| 539B-X0041-C01 | V97R; P99A; A102S |
| 539B-X0041-E01 | P99A |
| 539B-X0041-F01 | A102S |
| 539B-X0041-A02 | M58H |
| 539B-X0041-B02 | V97R |
| 539B-X0041-C02 | M56Y |
| 539B-X0041-D02 | W31D |
| Clone: | Light chain Swap: LC is S25N |
| 539B-X0042-C01 | X0041-A01 |
| 539B-X0042-B02 | X0041-B01 |
| 539B-X0042-F03 | X0041-C01 |
| 539B-X0042-G04 = | X0041-E01 |
| 539B- X0042-B04 | |
| 539B-X0042-A05 | X0041-F01 |
| 539B-X0042-D06 | X0041-A02 |
| 539B-X0042-C07 | X0041-B02 |
| 539B-X0042-H08 | X0041-C02 |
| 539B-X0042-G09 | X0041-D02 |

[0491] LC S25N glycosylated variants of DX-2712, M008-H09, M0121-E07:

| Clone: | Details |
|---|---|
| 539B-X0041-D01 | DX-2712 + sugar |
| 539B-X0041-G01 | Parental (M0008-H09) + sugar |
| 539B-X0041-H01 | Back-up (M0121-E07) + sugar |

[0492] 22 mutants of DX-2712 plus 3 LC S25N glycosylated variants of DX-2712, M008-H09, M0121-E07:

| Isolate | L-Leader | LV-FR1 | LV-CDR1 | LV-FR2 | LV-CDR2 | LV-FR3 | LV-CDR3 | LV-FR4 | L-Constant |
|---|---|---|---|---|---|---|---|---|---|
| 539B-X0041-A01 | GVHS | DIQMTQSPS | RASQSI | WYQQKPG | AASS | GVPSRFSGSGS | QQAGI | FGQGT | RTVAAPSVFIFPPSDEQLKSGTASVVCLLNNF |
| | | SLSASVGDR | YTYLN | KAPKLLIY | LQS | GTDFTLTISSL | | KLEIK | YPREAKVQWKVDNALQSGNSQESVTEQDSKDS |
| | | VTITC | | | | QPEDFATYYC | | | TYSLSSTLTLSKADYEKHKVYACEVTHQGLSS |
| | | | | | | | | | PVTKSFNRGEC.. |
| 539B-X0041-A02 | GVHS | DIQMTQSPS | RASQSI | WYQQKPG | AASS | GVPSRFSGSGS | QQAGI | FGQGT | |
| | | SLSASVGDR | YTYLN | KAPKLLIY | LQS | GTDFTLTISSL | | KLEIK | |
| | | VTITC | | | | QPEDFATYYC | | | |
| 539B-X0041-B01 | GVHS | DIQMTQSPS | RASQSI | WYQQKPG | AASS | GVPSRFSGSGS | QQAGI | FGQGT | |
| | | SLSASVGDR | YTYLN | KAPKLLIY | LQS | GTDFTLTISSL | | KLEIK | |
| | | VTITC | | | | QPEDFATYYC | | | |
| 539B-X0041-B02 | GVHS | DIQMTQSPS | RASQSI | WYQQKPG | AASS | GVPSRFSGSGS | QQAGI | FGQGT | |
| | | SLSASVGDR | YTYLN | KAPKLLIY | LQS | GTDFTLTISSL | | KLEIK | |
| | | VTITC | | | | QPEDFATYYC | | | |
| 539B-X0041-C01 | GVHS | DIQMTQSPS | RASQSI | WYQQKPG | AASS | GVPSRFSGSGS | QQAGI | FGQGT | |
| | | SLSASVGDR | YTYLN | KAPKLLIY | LQS | GTDFTLTISSL | | KLEIK | |
| | | VTITC | | | | QPEDFATYYC | | | |
| 539B-X0041-C02 | GVHS | DIQMTQSPS | RASQSI | WYQQKPG | AASS | GVPSRFSGSGS | QQAGI | FGQGT | RTVAAPSVFIFPPSDEQLKSGTASVVCLLNNF |
| | | SLSASVGDR | YTYLN | KAPKLLIY | LQS | GTDFTLTISSL | | KLEIK | YPREAKVQWKVDNALQSGNSQESVTEQDSKDS |
| | | VTITC | | | | QPEDFATYYC | | | TYSLSSTLTLSKADYEKHKVYACEVTHQGLSS |
| | | | | | | | | | PVTKSFNRGEC.. |
| 539B-X0041-D01 | GVHS | DIQMTQSPS | RANQSI | WYQQKPG | AASS | GVPSRFSGSGS | QQAGI | FGQGT | |
| | | SLSASVGDR | YTYLN | KAPKLLIY | LQS | GTDFTLTISSL | | KLEIK | |
| | | VTITC | | | | QPEDFATYYC | | | |
| 539B-X0041-D02 | GVHS | DIQMTQSPS | RASQSI | WYQQKPG | AASS | GVPSRFSGSGS | QQAGI | FGQGT | RTVAAPSVFIFPPSDEQLKSGTASVVCLLNNF |
| | | SLSASVGDR | YTYLN | KAPKLLIY | LQS | GTDFTLTISSL | | KLEIK | YPREAKVQWKVDNALQSGNSQESVTEQDSKDS |
| | | VTITC | | | | QPEDFATYYC | | | TYSLSSTLTLSKADYEKHKVYACEVTHQGLSS |
| | | | | | | | | | PVTKSFNRGEC.. |
| 539B-X0041-E01 | GVHS | DIQMTQSPS | RASQSI | WYQQKPG | AASS | GVPSRFSGSGS | QQAGI | FGQGT | |
| | | SLSASVGDR | YTYLN | KAPKLLIY | LQS | GTDFTLTISSL | | KLEIK | |
| | | VTITC | | | | QPEDFATYYC | | | |
| 539B-X0041-F01 | GVHS | DIQMTQSPS | RASQSI | WYQQKPG | AASS | GVPSRFSGSGS | QQAGI | FGQGT | |
| | | SLSASVGDR | YTYLN | KAPKLLIY | LQS | GTDFTLTISSL | | KLEIK | |
| | | VTITC | | | | QPEDFATYYC | | | |
| 539B-X0041-G01 | GVHS | DIQMTQSPS | RANQSI | WYQQKPG | AASS | GVPSRFSGSGS | QQAGI | FGQGT | RTVAAPSVFIFPPSDEQLKSGTASVVCLLNNF |
| | | SLSASVGDR | YTYLN | KAPKLLIY | LQS | GTDFTLTISSL | | KLEIK | YPREAKVQWKVDNALQSGNSQESVTEQDSKDS |
| | | VTITC | | | | QPEDFATYYC | | | TYSLSSTLTLSKADYEKHKVYACEVTHQGLSS |
| | | | | | | | | | PVTKSFNRGEC.. |
| 539B-X0041-H01 | GVHS | DIQMTQSPS | RANQSI | WYQQKPG | AASS | GVPSRFSGSGS | QQAGI | FGQGT | |
| | | SLSASVGDR | YTYLN | KAPKLLIY | LQS | GTDFTLTISSL | | KLEIK | |
| | | VTITC | | | | QPEDFATYYC | | | |
| 539B-X0042-A05 | GVHS | DIQMTQSPS | RANQSI | WYQQKPG | AASS | GVPSRFSGSGS | QQAGI | FGQGT | RTVAAPS |
| | | SLSASVGDR | YTYLN | KAPKLLIY | LQS | GTDFTLTISSL | | KLEIK | |
| | | VTITC | | | | QPEDFATYYC | | | |
| 539B-X0042-B02 | GVHS | DIQMTQSPS | RANQSI | WYQQKPG | AASS | GVPSRFSGSGS | QQAGI | FGQGT | RTVAAPSVFIFPPSDEQLKSGTASVVCLLNNF |
| | | SLSASVGDR | YTYLN | KAPKLLIY | LQS | GTDFTLTISSL | | KLEIK | YPREAKVQWKVDNALQSGNSQESVTEQDSKDS |
| | | VTITC | | | | QPEDFATYYC | | | zYSLSSTLTLSKADYEKHKVYACEVTHQGLSS |
| | | | | | | | | | PVTKSFNRGEC.. |
| 539B-X0042-B04 | GVHS | DIQMTQSPS | RANQSI | WYQQKPG | AASS | GVPSRFSGSGS | QQAGI | FGQGT | RTVAAPSVFIFPPSDEQLKSGTASVVCLLNNF |
| | | SLSASVGDR | YTYLN | KAPKLLIY | LQS | GTDFTLTISSL | | KLEIK | YPREAKVQWKVDNALQSGNSQESVTEQDSKDS |
| | | VTITC | | | | QPEDFATYYC | | | zYSLSSTLTLSKADYEKHKVYACEVTHQGLSS |
| | | | | | | | | | PVTKSFNRGEC.. |
| 539B-X0042-C01 | GVHS | DIQMTQSPS | RANQSI | WYQQKPG | AASS | GVPSRFSGSGS | QQAGI | FGQGT | RTVAAPSVFIFPPSDEQLKSGTASVVCLLNNF |
| | | SLSASVGDR | YTYLN | KAPKLLIY | LQS | GTDFTLTISSL | | KLEIK | YPREAKVQWKVDNALQSGNSQESVTEQDSKDz |
| | | VTITC | | | | QPEDFATYYC | | | zYSLSSTLTLSKADYEKHKVYACEVTHQGLSS |
| | | | | | | | | | PVTKSFNRGEC.. |
| 539B-X0042-C07 | GVHS | DIQMTQSPS | RANQSI | WYQQKPG | AASS | GVPSRFSGSGS | QQAGI | FGQGT | RTVAAPSVFIFPPSDEQLKSGTASVVCLLNNF |
| | | SLSASVGDR | YTYLN | KAPKLLIY | LQS | GTDFTLTISSL | | KLEIK | YPREAKVQWKVDNALQSGNSQESVTEQDSKDS |
| | | VTITC | | | | QPEDFATYYC | | | zLLPVQHPDPVQGRLREAQGVRLRGDPPGPVL |
| | | | | | | | | | PRDQVLQPGRVLM |
| 539B-X0042-D06 | GVHS | DIQMTQSPS | RANQSI | WYQQKPG | AASS | GVPSRFSGSGS | QQAGI | FGQGT | RTVAAPSVFIFPPSDEQLKSGTASVVCLLNNF |
| | | SLSASVGDR | YTYLN | KAPKLLIY | LQS | GTDFTLTISSL | | KLEIK | YPREAKVQWKVDNALQSGNSQESVTEQDSKDS |
| | | VTITC | | | | QPEDFATYYC | | | zYSLSSTLTLSKADYEKHKVYACEVTHQGLSS |
| | | | | | | | | | PVTKSFNRGEC.. |
| 539B-X0042-F03 | GVHS | DIQMTQSPS | RANQSI | WYQQKPG | AASS | GVPSRFSGSGS | QQAGI | FGQGT | RTVAAPSVFIFPPSDEQLKSGTASVVCLLNNF |
| | | SLSASVGDR | YTYLN | KAPKLLIY | LQS | GTDFTLTISSL | | KLEIK | YPREAKVQWKVDNALQSGNSQESVTEQDSKDz |
| | | VTITC | | | | QPEDFATYYC | | | zYSLSSTLTLSKADYEKHKVYACEVTHQGLSS |
| | | | | | | | | | PVTKSFNRGEC.. |
| 539B-X0042-G04 | GVHS | DIQMTQSPS | RANQSI | WYQQKPG | AASS | GVPSRFSGSGS | QQAGI | FGQGT | RTVAAPSVFIFPPSDEQLKSGTASVVCLLNNF |
| | | SLSASVGDR | YTYLN | KAPKLLIY | LQS | GTDFTLTISSL | | KLEIK | YPREAKVQWKVDNALQSGNSQESVTEQDSKDz |
| | | VTITC | | | | QPEDFATYYC | | | zYSLSSTLTLSKADYEKHKVYACEVTHQGLSS |
| | | | | | | | | | PVTKSFNRGEC.. |
| 539B-X0042-G09 | GVHS | DIQMTQSPS | RANQSI | WYQQKPG | AASS | GVPSRFSGSGS | QQAGI | FGQGT | RTVAAPSVFIFPPSDEQLKSGTASVVCLLNNF |
| | | SLSASVGDR | YTYLN | KAPKLLIY | LQS | GTDFTLTISSL | | KLEIK | YPREAKVQWKVDNALQSGNSQESVTEQDSKDz |
| | | VTITC | | | | QPEDFATYYC | | | zYSLSSTLTLSKADYEKHKVYACEVTHQGLSS |
| | | | | | | | | | PVTKSFNRGEC.. |
| 539B-X0042-H08 | GVHS | DIQMTQSPS | RANQSI | WYQQKPG | AASS | GVPSRFSGSGS | QQAGI | FGQGT | RTVAAPS |
| | | SLSASVGDR | YTYLN | KAPKLLIY | LQS | GTDFTLTISSL | | KLEIK | |
| | | VTITC | | | | QPEDFATYYC | | | |
| 539B-X0041-A01 | MGWSCIILFLVATATGAHS | EVQLLESGGGLVQP | DYWMH | WVRQAPGKG | GISPSGGYTH | RFTISRDNSKNTLYL | DIVGPYSA | WGRGTLVT | ASTKGPSVFP |
| | | GGSLRLSCAASGFT | | LEWVS | YADSVKG | QMNSLRAEDTAVYYC | GLFDY | VSS | LAPSSKS |
| | | FS | | | | AR | | | |
| 539B-X0041-A02 | MGWSCIILFLVATATGAHS | EVQLLESGGGLVQP | WYWMH | WVRQAPGKG | GISPSGGMTH | RFTISRDNSKNTLYL | DIVGPYSA | WGRGTLVT | ASTKGPSVFP |
| | | GGSLRLSCAASGFT | | LEWVS | YADSVKG | QMNSLRAEDTAVYYC | GLFDY | VSS | LAPSSKS |
| | | FS | | | | AR | | | |
| 539B-X0041- | MGWSCIILFL | EVQLLESGGGLVQP | DYWMH | WVRQAPGKG | GISPSGGYTH | RFTISRDNSKNTLYL | DIRGAYSS | WGRGTLVT | ASTKGPSVFP |
| B01 | VATATGAHS | GGSLRLSCAASGFT | | LEWVS | YADSVKG | QMNSLRAEDTAVYYC | GLFDY | VSS | LAPSSKS |
| | | FS | | | | AR | | | |
| 539B-X0041- | MGWSCIILFL | EVQLLESGGGLVQP | WYWMH | WVRQAPGKG | GISPSGGMTM | RFTISRDNSKNTLYL | DIRGPYSA | WGRGTLVT | ASTKGPSVFP |
| B02 | VATATGAHS | GGSLRLSCAASGFT | | LEWVS | YADSVKG | QMNSLRAEDTAVYYC | GLFDY | VSS | LAPSSKS |
| | | FS | | | | AR | | | |
| 539B-X0041- | MGWSCIILFL | EVQLLESGGGLVQP | WYWMH | WVRQAPGKG | GISPSGGMTM | RFTISRDNSKNTLYL | DIRGAYSS | WGRGTLVT | ASTKGPSVFP |
| C01 | VATATGAHS | GGSLRLSCAASGFT | | LEWVS | YADSVKG | QMNSLRAEDTAVYYC | GLFDY | VSS | LAPSSKS |
| | | FS | | | | AR | | | |
| 539B-X0041- | MGWSCIILFL | EVQLLESGGGLVQP | WYWMH | WVRQAPGKG | GISPSGGYTM | RFTISRDNSKNTLYL | DIVGPYSA | WGRGTLVT | ASTKGPSVFP |
| C02 | VATATGAHS | GGSLRLSCAASGFT | | LEWVS | YADSVKG | QMNSLRAEDTAVYYC | GLFDY | VSS | LAPSSKS |
| | | FS | | | | AR | | | |
| 539B-X0041- | MGWSCIILFL | EVQLLESGGGLVQP | WYWMH | WVRQAPGKG | GISPSGGMTM | RFTISRDNSKNTLYL | DIVGPYSA | WGRGTLVT | ASTKGPSVFP |
| D01 | VATATGAHS | GGSLRLSCAASGFT | | LEWVS | YADSVKG | QMNSLRAEDTAVYYC | GLFDY | VSS | LAPSSKS |
| | | FS | | | | AR | | | |
| 539B-X0041- | MGWSCIILFL | EVQLLESGGGLVQP | DYWMH | WVRQAPGKG | GISPSGGMTM | RFTISRDNSKNTLYL | DIVGPYSA | WGRGTLVT | ASTKGPSVFP |
| D02 | VATATGAHS | GGSLRLSCAASGFT | | LEWVS | YADSVKG | QMNSLRAEDTAVYYC | GLFDY | VSS | LAPSSKS |
| | | FS | | | | AR | | | |
| 539B-X0041- | MGWSCIILFL | EVQLLESGGGLVQP | WYWMH | WVRQAPGKG | GISPSGGMTM | RFTISRDNSKNTLYL | DIVGAYSA | WGRGTLVT | ASTKGPSVFP |
| E01 | VATATGAHS | GGSLRLSCAASGFT | | LEWVS | YADSVKG | QMNSLRAEDTAVYYC | GLFDY | VSS | LAPSSKS |
| | | FS | | | | AR | | | |
| 539B-X0041- | MGWSCIILFLVATATGAHS | EVQLLESGGGLVQP | WYWMH | WVRQAPGKG | GISPSGGMTM | RFTISRDNSKNTLYL | DIVGPYSS | WGRGTLVT | ASTKGPSVFP |
| F01 | | GGSLRLSCAASGFT | | LEWVS | YADSVKG | QMNSLRAEDTAVYYC | GLFDY | VSS | LAPSSKS |
| | | FS | | | | AR | | | |
| 539B-X0041- | MGWSCIILFL | EVQLLESGGGLVQP | DYNMH | WVRQAPGKG | YIGPSGGYTH | RFTISRDNSKNTLYL | DIRGAYSS | WGRGTLVT | ASTKGPSVFP |
| G01 | VATATGAHS | GGSLRLSCAASGFT | | LEWVS | YADSVKG | QMNSLRAEDTAVYYC | GLFDY | VSS | LAPSSKS |
| | | FS | | | | AK | | | |
| 539B-X0041- | MGWSCIILFL | EVQLLESGGGLVQP | WYGMH | WVRQAPGKG | GIVSSGGETF | RFTISRDNSKNTLYL | DIRGVFLS | WGRGTLVT | ASTKGPSVFP |
| H01 | VATATGAHS | GGSLRLSCAASGFT | | LEWVS | YADSVKG | QMNSLRAEDTAVYYC | GLFDY | VSS | LAPSSKS |
| | | FS | | | | AK | | | |
| 539B-X0042-A05 | MGWSCIILFLVATATGAHS | EVQLLESGGGLVQP | WYWMH | WVRQAPGKG | GISPSGGMTM | RFTISRDNSKNTLYL | DIVGPYSS | WGRGTLVT | ASTKGPSVFP |
| | | GGSLRLSCAASGFT | | LEWVS | YADSVKG | QMNSLRAEDTAVYYC | GLFDY | VSS | LAPSLQV |
| | | FS | | | | AR | | | |
| 539B-X0042-B02 | MGWSCIILFL | EVQLLESGGGLVQP | DYWMH | WVRQAPGKG | GISPSGGYTH | RFTISRDNSKNTLYL | DIRGAYSS | WGRGTLVT | ASTKGPSVFP |
| | VATATGAHS | GGSLRLSCAASGFT | | LEWVS | YADSVKG | QMNSLRAEDTAVYYC | GLFDY | VSS | LAPSSKS |
| | | FS | | | | AR | | | |
| 539B-X0042- | MGWSCIILFL | EVQLLESGGGLVQP | WYWMH | WVRQAPGKG | GISPSGGMTM | RFTISRDNSKNTLYL | DIVGAYSA | WGRGTLVT | ASTKGPSVFP |
| B04 | VATATGAHS | GGSLRLSCAASGFT | | LEWVS | YADSVKG | QMNSLRAEDTAVYYC | GLFDY | VSS | LAPSSKS |
| | | FS | | | | AR | | | |
| 539B-X0042- | MGWSCIILFL | EVQLLESGGGLVQP | DYWMH | WVRQAPGKG | GISPSGGYTH | RFTISRDNSKNTLYL | DIVGPYSA | WGRGTLVT | ASTKGPSVFP |
| C01 | VATATGAHS | GGSLRLSCAASGFT | | LEWVS | YADSVKG | QMNSLRAEDTAVYYC | GLFDY | VSS | LAPSSKS |
| | | FS | | | | AR | | | |
| 539B-X0042- | MGWSCIILFL | EVQLLESGGGLVQP | WYWMH | WVRQAPGKG | GISPSGGMTM | RFTISRDNSKNTLYL | DIRGPYSA | WGRGTLVT | ASTKGPSVFP |
| C07 | VATATGAHS | GGSLRLSCAASGFT | | LEWVS | YADSVKG | QMNSLRAEDTAVYYC | GLFDY | VSS | LAPSSKS |
| | | FS | | | | AR | | | |
| 539B-X0042- | MGWSCIILFLVATATGAHS | EVQLLESGGGLVQP | WYWMH | WVRQAPGKG | GISPSGGMTM | RFTISRDNSKNTLYL | DIVGPYSA | WGRGTLVT | ASTKGPSVFP |
| D06 | | GGSLRLSCAASGFT | | LEWVS | YADSVKG | QMNSLRAEDTAVYYC | GLFDY | VSS | LAPSSKS |
| | | FS | | | | AR | | | |
| 539B-X0042-F03 | MGWSCIILFL | EVQLLESGGGLVQP | WYWMH | WVRQAPGKG | GISPSGGMTM | RFTISRDNSKNTLYL | DIRGAYSS | WGRGTLVT | ASTKGPSVFP |
| | VATATGAHS | GGSLRLSCAASGFT | | LEWVS | YADSVKG | QMNSLRAEDTAVYYC | GLFDY | VSS | LAPSSKS |
| | | FS | | | | AR | | | |
| 539B-X0042-G04 | MGWSCIILFL | EVQLLESGGGLVQP | WYWMH | WVRQAPGKG | GISPSGGMTM | RFTISRDNSKNTLYL | DIVGAYSA | WGRGTLVT | ASTKGPSVFP |
| | VATATGAHS | GGSLRLSCAASGFT | | LEWVS | YADSVKG | QMNSLRAEDTAVYYC | GLFDY | VSS | LAPSSKS |
| | | FS | | | | AR | | | |
| 539B-X0042-G09 | MGWSCIILFLVATATGAHS | EVQLLESGGGLVQP | DYWMH | WVRQAPGKG | GISPSGGMTM | RFTISRDNSKNTLYL | DIVGPYSA | WGRGTLVT | ASTKGPSVFP |
| | | GGSLRLSCAASGFT | | LEWVS | YADSVKG | QMNSLRAEDTAVYYC | GLFDY | VSS | LAPSSKS |
| | | FS | | | | AR | | | |
| 539B-X0042-H08 | MGWSCIILFL | EVQLLESGGGLVQP | WYWMH | WVRQAPGKG | GISPSGGYTM | RFTISRDWNSKNTLYL | DIVGPYSA | WGRGTLVT | ASTKGPSVFP |
| | VATATGAHS | GGSLRLSCAASGFT | | LEWVS | YADSVKG | QMNSLRAEDTAVYYC | GLFDY | VSS | LAPSSKS |
| | | FS | | | | AR | | | |

| Isolate | LV-AA | HV-AA |
|---|---|---|
| 539B-X0041-A01 | DIQMTQSPSSLSASVGDRVTITCRASQSIYTYLNWYQQKPGKAPKLLIYA | EVQLLESGGGLVQPGGSLRLSCAASGFTFSDYWMHWVRQAPGKGLEWVSGISPSGGYT |
| | ASSLQSGVPSRFSGSGSGTDFTLTISSLQPEDFATYYCQQAGIFGQGTKLEIK | HYADSVKGRFTISRDNSKNTLYLQMNSLRAEDTAVYYCARDIVGPYSAGLFDYWGRGTLVTVSS |
| 539B-X0041- | DIQMTQSPSSLSASVGDRVTITCRASQSIYTYLNWYQQKPGKAPKLLIYA | EVQLLESGGGLVQPGGSLRLSCAASGFTFSWYWMHWVRQAPGKGLEWVSGISPSGGMT |
| A02 | ASSLQSGVPSRFSGSGSGTDFTLTISSLQPEDFATYYCQQAGIFGQGTKLEIK | HYADSVKGRFTISRDNSKNTLYLQMNSLRAEDTAVYYCARDIVGPYSAGLFDYWGRGTLVTVSS |
| 539B-X0041-B01 | DIQMTQSPSSLSASVGDRVTITCRASQSIYTYLNWYQQKPGKAPKLLIYA | EVQLLESGGGLVQPGGSLRLSCAASGFTFSDYWMHWVRQAPGKGLEWVSGISPSGGYT |
| | ASSLQSGVPSRFSGSGSGTDFTLTISSLQPEDFATYYCQQAGIFGQGTKLEIK | HYADSVKGRFTISRDNSKNTLYLQMNSLRAEDTAVYYCARDIRGAYSSGLFDYWGRGTLVTVSS |
| 539B-X0041-B02 | DIQMTQSPSSLSASVGDRVTITCRASQSIYTYLNWYQQKPGKAPKLLIYA | EVQLLESGGGLVQPGGSLRLSCAASGFTFSWYWMHWVRQAPGKGLEWVSGISPSGGMT |
| | ASSLQSGVPSRFSGSGSGTDFTLTISSLQPEDFATYYCQQAGIFGQGTKLEIK | MYADSVKGRFTISRDNSKNTLYLQMNSLRAEDTAVYYCARDIRGPYSAGLFDYWGRGTLVTVSS |
| 539B-X0041- | DIQMTQSPSSLSASVGDRVTITCRASQSIYTYLNWYQQKPGKAPKLLIYA | EVQLLESGGGLVQPGGSLRLSCAASGFTFSWYWMHWVRQAPGKGLEWVSGISPSGGMT |
| C01 | ASSLQSGVPSRFSGSGSGTDFTLTISSLQPEDFATYYCQQAGIFGQGTKL | MYADSVKGRFTISRDNSKNTLYLQMNSLRAEDTAVYYCARDIRGAYSSGLFDYWGRGTLVTVSS |
| | EIK | |
| 539B-X0041- | DIQMTQSPSSLSASVGDRVTITCRASQSIYTYLNWYQQKPGKAPKLLIYA | EVQLLESGGGLVQPGGSLRLSCAASGFTFSWYWMHWVRQAPGKGLEWVSGISPSGGYT |
| C02 | ASSLQSGVPSRFSGSGSGTDFTLTISSLQPEDFATYYCQQAGIFGQGTKL | MYADSVKGRFTISRDNSKNTLYLQMNSLRAEDTAVYYCARDIVGPYSAGLFDYWGRGTLVTVSS |
| | EIK | |
| 539B-X0041- | DIQMTQSPSSLSASVGDRVTITCRANQSIYTYLNWYQQKPGKAPKLLIYA | EVQLLESGGGLVQPGGSLRLSCAASGFTFSWYWMHWVRQAPGKGLEWVSGISPSGGMT |
| D01 | ASSLQSGVPSRFSGSGSGTDFTLTISSLQPEDFATYYCQQAGIFGQGTKL | MYADSVKGRFTISRDNSKNTLYLQMNSLRAEDTAVYYCARDIVGPYSAGLFDYWGRGTLVTVSS |
| | EIK | |
| 539B-X0041- | DIQMTQSPSSLSASVGDRVTITCRASQSIYTYLNWYQQKPGKAPKLLIYA | EVQLLESGGGLVQPGGSLRLSCAASGFTFSDYWMHWVRQAPGKGLEWVSGISPSGGMT |
| D02 | ASSLQSGVPSRFSGSGSGTDFTLTISSLQPEDFATYYCQQAGIFGQGTKL | MYADSVKGRFTISRDNSKNTLYLQMNSLRAEDTAVYYCARDIVGPYSAGLFDYWGRGTLVTVSS |
| | EIK | |
| 539B-X0041- | DIQMTQSPSSLSASVGDRVTITCRASQSIYTYLNWYQQKPGKAPKLLIYA | EVQLLESGGGLVQPGGSLRLSCAASGFTFSWYWMHWVRQAPGKGLEWVSGISPSGGMT |
| E01 | ASSLQSGVPSRFSGSGSGTDFTLTISSLQPEDFATYYCQQAGIFGQGTKL | MYADSVKGRFTISRDNSKNTLYLQMNSLRAEDTAVYYCARDIVGAYSAGLFDYWGRGTLVTVSS |
| | EIK | |
| 539B-X0041- | DIQMTQSPSSLSASVGDRVTITCRASQSIYTYLNWYQQKPGKAPKLLIYA | EVQLLESGGGLVQPGGSLRLSCAASGFTFSWYWMHWVRQAPGKGLEWVSGISPSGGMT |
| F01 | ASSLQSGVPSRFSGSGSGTDFTLTISSLQPEDFATYYCQQAGIFGQGTKL | MYADSVKGRFTISRDNSKNTLYLQMNSLRAEDTAVYYCARDIVGPYSSGLFDYWGRGTLVTVSS |
| | EIK | |
| 539B-X0041- | DIQMTQSPSSLSASVGDRVTITCRANQSIYTYLNWYQQKPGKAPKLLIYA | EVQLLESGGGLVQPGGSLRLSCAASGFTFSDYNMHWVRQAPGKGLEWVSYIGPSGGYT |
| G01 | ASSLQSGVPSRFSGSGSGTDFTLTISSLQPEDFATYYCQQAGIFGQGTKL | HYADSVKGRFTISRDNSKNTLYLQMNSLRAEDTAVYYCAKDIRGAYSSGLFDYWGRGTLVTVSS |
| | EIK | |
| 539B-X0041- | DIQMTQSPSSLSASVGDRVTITCRANQSIYTYLNWYQQKPGKAPKLLIYA | EVQLLESGGGLVQPGGSLRLSCAASGFTFSWYGMHWVRQAPGKGLEWVSGIVSSGGET |
| H01 | ASSLQSGVPSRFSGSGSGTDFTLTISSLQPEDFATYYCQQAGIFGQGTKL | FYADSVKGRFTISRDNSKNTLYLQMNSLRAEDTAVYYCAKDIRGVFLSGLFDHWGRGTLVTVSS |
| | EIK | |
| 539B-X0042- | DIQMTQSPSSLSASVGDRVTITCRANQSIYTYLNWYQQKPGKAPKLLIYA | EVQLLESGGGLVQPGGSLRLSCAASGFTFSWYWMHWVRQAPGKGLEWVSGISPSGGMT |
| A05 | ASSLQSGVPSRFSGSGSGTDFTLTISSLQPEDFATYYCQQAGIFGQGTKL | MYADSVKGRFTISRDNSKNTLYLQMNSLRAEDTAVYYCARDIVGPYSSGLFDYWGRGTLVTVSS |
| | EIK | |
| 539B-X0042- | DIQMTQSPSSLSASVGDRVTITCRANQSIYTYLNWYQQKPGKAPKLLIYA | EVQLLESGGGLVQPGGSLRLSCAASGFTFSDYWMHWVRQAPGKGLEWVSGISPSGGYT |
| B02 | ASSLQSGVPSRFSGSGSGTDFTLTISSLQPEDFATYYCQQAGIFGQGTKL | HYADSVKGRFTISRDNSKNTLYLQMNSLRAEDTAVYYCARDIRGAYSSGLFDYWGRGTLVTVSS |
| | EIK | |
| 539B-X0042-B04 | DIQMTQSPSSLSASVGDRVTITCRANQSIYTYLNWYQQKPGKAPKLLIYA | EVQLLESGGGLVQPGGSLRLSCAASGFTFSWYWMHWVRQAPGKGLEWVSGISPSGGMT |
| | ASSLQSGVPSRFSGSGSGTDFTLTISSLQPEDFATYYCQQAGIFGQGTKLEIK | MYADSVKGRFTISRDNSKNTLYLQMNSLRAEDTAVYYCARDIVGAYSAGLFDYWGRGTLVTVSS |
| 539B-X0042-C01 | DIQMTQSPSSLSASVGDRVTITCRANQSIYTYLNWYQQKPGKAPKLLIYA | EVQLLESGGGLVQPGGSLRLSCAASGFTFSDYWMHWVRQAPGKGLEWVSGISPSGGYT |
| | ASSLQSGVPSRFSGSGSGTDFTLTISSLQPEDFATYYCQQAGIFGQGTKL | HYADSVKGRFTISRDNSKNTLYLQMNSLRAEDTAVYYCARDIVGPYSAGLFDYWGRGTLVTVSS |
| | EIK | |
| 539B-X0042- | DIQMTQSPSSLSASVGDRVTITCRANQSIYTYLNWYQQKPGKAPKLLIYA | EVQLLESGGGLVQPGGSLRLSCAASGFTFSWYWMHWVRQAPGKGLEWVSGISPSGGMT |
| C07 | ASSLQSGVPSRFSGSGSGTDFTLTISSLQPEDFATYYCQQAGIFGQGTKL | MYADSVKGRFTISRDNSKNTLYLQMNSLRAEDTAVYYCARDIRGPYSAGLFDYWGRGTLVTVSS |
| | EIK | |
| 539B-X0042- | DIQMTQSPSSLSASVGDRVTITCRANQSIYTYLNWYQQKPGKAPKLLIYA | EVQLLESGGGLVQPGGSLRLSCAASGFTFSWYWMHWVRQAPGKGLEWVSGISPSGGMT |
| D06 | ASSLQSGVPSRFSGSGSGTDFTLTISSLQPEDFATYYCQQAGIFGQGTKL | MYADSVKGRFTISRDNSKNTLYLQMNSLRAEDTAVYYCARDIVGPYSAGLFDYWGRGTLVTVSS |
| | EIK | |
| 539B-X0042- | DIQMTQSPSSLSASVGDRVTITCRANQSIYTYLNWYQQKPGKAPKLLIYA | EVQLLESGGGLVQPGGSLRLSCAASGFTFSWYWMHWVRQAPGKGLEWVSGISPSGGMT |
| F03 | ASSLQSGVPSRFSGSGSGTDFTLTISSLQPEDFATYYCQQAGIFGQGTKL | MYADSVKGRFTISRDNSKNTLYLQMNSLRAEDTAVYYCARDIRGAYSSGLFDYWGRGTLVTVSS |
| | EIK | |
| 539B-X0042-G04 | DIQMTQSPSSLSASVGDRVTITCRANQSIYTYLNWYQQKPGKAPKLLIYA | EVQLLESGGGLVQPGGSLRLSCAASGFTFSWYWMHWVRQAPGKGLEWVSGISPSGGMT |
| | ASSLQSGVPSRFSGSGSGTDFTLTISSLQPEDFATYYCQQAGIFGQGTKL | MYADSVKGRFTISRDNSKNTLYLQMNSLRAEDTAVYYCARDIVGAYSAGLFDYWGRGTLVTVSS |
| | EIK | |
| 539B-X0042-G09 | DIQMTQSPSSLSASVGDRVTITCRANQSIYTYLNWYQQKPGKAPKLLIYA | EVQLLESGGGLVQPGGSLRLSCAASGFTFSDYWMHWVRQAPGKGLEWVSGISPSGGMT |
| | ASSLQSGVPSRFSGSGSGTDFTLTISSLQPEDFATYYCQQAGIFGQGTKL | MYADSVKGRFTISRDNSKNTLYLQMNSLRAEDTAVYYCARDIVGPYSAGLFDYWGRGTLVTVSS |
| | EIK | |
| 539B-X0042-H08 | DIQMTQSPSSLSASVGDRVTITCRANQSIYTYLNWYQQKPGKAPKLLIYA | EVQLLESGGGLVQPGGSLRLSCAASGFTFSWYWMHWVRQAPGKGLEWVSGISPSGGYT |
| | ASSLQSGVPSRFSGSGSGTDFTLTISSLQPEDFATYYCQQAGIFGQGTKL | MYADSVKGRFTISRDNSKNTLYLQMNSLRAEDTAVYYCARDIVGPYSAGLFDYWGRGT |
| | EIK | LVTVSS |

[0493] Further, 13 variants on 539B-X0041-D02 were prepared.

[0494] 539B-X0041-D02 plus 13 mutants of 539B-X0041-D02:

| Isolate | Initial Name | L-Leader | LV-FR1 | LV-CDR1 | LV-FR2 | LV-CDR2 | LV-FR3 | LV-CDR3 | LV-FR4 | L-Constant |
|---|---|---|---|---|---|---|---|---|---|---|
| 539B-X0041-D02 | 539B-X0041-D02 | GVHS | DIQMTQSPSSLS | RASQSIYT | WYQQKP | AASSLQS | GVPSRFSGSG | QQAGI | FGQGTKLE | RTVAAPSVFIFPPSDEQLKSGTASVVCL |
| | | | ASVGDRVTITC | YLN | GKAPKL | | SGTDFTLTIS | | IK | LNNFYPREAKVQWKVDNALQSGNSQESV |
| | | | | | LIY | | SLQPEDFATY | | | TEQDSKDSTYSLSSTLTLSKADYEKHKV |
| | | | | | | | YC | | | YACEVTHQGLSSPVTKSFNRGEC.. |
| 539B-X0049-A01 | X49-A01- | GVHS | DIQMTQSPSSLS | RASQSIYT | WYQQKP | AASSLQS | GVPSRFSGSG | QQAGI | FGQGTKLE | RTVAAPSVFIFPPSDEQLKSGTASVVCL |
| | M at | | ASVGDRVTITC | YLN | GKAPKL | | SGTDFTLTIS | | IK | LNNFYPREAKVQWKVDNALQSGNSQESV |
| | H34(germline)-LEU (L) | | | | LIY | | SLQPEDFATY | | | TEQDSKDSTYSLSSTLTLSKADYEKHKV |
| | | | | | | | YC | | | YACEVTHQGLSSPVTKSFNRGEC.. |
| 539B-X0049-B01 | X49-B01- | GVHS | DIQMTQSPSSLS | RASQSIYT | WYQQKP | AASSLQS | GVPSRFSGSG | QQAGI | FGQGTKLE | RTVAAPSVFIFPPSDEQLKSGTASVVCL |
| | M at | | ASVGDRVTITC | YLN | GKAPKL | | SGTDFTLTIS | | IK | LNNFYPREAKVQWKVDNALQSGNSQESV |
| | H34(germline)- | | | | LIY | | SLQPEDFATY | | | TEQDSKDSTYSLSSTLTLSKADYEKHKV |
| | THR | | | | | | YC | | | YACEVTHQGLSSPVTKSFNRGEC.. |
| | (T) | | | | | | | | | |
| 539B-X0049-C01 | X49-C01- | GVHS | DIQMTQSPSSLS | RASQSIYT | WYQQKP | AASSLQS | GVPSRFSGSG | QQAGI | FGQGTKLE | RTVAAPSVFIFPPSDEQLKSGTASVVCL |
| | M at H56- | | ASVGDRVTITC | YLN | GKAPKL | | SGTDFTLTIS | | IK | LNNFYPREAKVQWKVDNALQSGNSQESV |
| | SER (S) | | | | LIY | | SLQPEDFATY | | | TEQDSKDSTYSLSSTLTLSKADYEKHKV |
| | | | | | | | YC | | | YACEVTHQGLSSPVTKSFNRGEC.. |
| 539B-X0049-D01 | X49-D01- | GVHS | DIQMTQSPSSLS | RASQSIYT | WYQQKP | AASSLQS | GVPSRFSGSG | QQAGI | FGQGTKLE | RTVAAPSVFIFPPSDEQLKSGTASVVCL |
| | M at H58- | | ASVGDRVTITC | YLN | GKAPKL | | SGTDFTLTIS | | IK | LNNFYPREAKVQWKVDNALQSGNSQESV |
| | TYR (Y) | | | | LIY | | SLQPEDFATY | | | TEQDSKDSTYSLSSTLTLSKADYEKHKV |
| | | | | | | | YC | | | YACEVTHQGLSSPVTKSFNRGEC.. |
| 539B-X0049-E01 | X49-E01- | GVHS | DIQMTQSPSSLS | RASQSIYT | WYQQKP | AASSLQS | GVPSRFSGSG | QQAGI | FGQGTKLE | RTVAAPSVFIFPPSDEQLKSGTASVVCL |
| | M at H56, | | ASVGDRVTITC | YLN | GKAPKL | | SGTDFTLTIS | | IK | LNNFYPREAKVQWKVDNALQSGNSQESV |
| | H58-SER, TYR (S, Y) | | | | LIY | | SLQPEDFATY | | | TEQDSKDSTYSLSSTLTLSKADYEKHKV |
| | | | | | | | YC | | | YACEVTHQGLSSPVTKSFNRGEC.. |
| 539B- | X49-F01- | GVHS | DIQMTQSPSSLS | RASQSIYT | WYQQKP | AASSLQS | GVPSRFSGSG | QQAGI | FGQGTKLE | RTVAAPSVFIFPPSDEQLKSGTASVVCL |
| X0049- | M at H34, | | ASVGDRVTITC | YLN | GKAPKL | | SGTDFTLTIS | | IK | LNNFYPREAKVQWKVDNALQSGNSQESV |
| F01 | H56, H58- | | | | LIY | | SLQPEDFATY | | | TEQDSKDSTYSLSSTLTLSKADYEKHKV |
| | LEU, SER, | | | | | | YC | | | YACEVTHQGLSSPVTKSFNRGEC.. |
| | TYR | | | | | | | | | |
| | (L, S, Y) | | | | | | | | | |
| 539B- | X49-G01- | GVHS | DIQMTQSPSSLS | RASQSIYT | WYQQKP | AASSLQS | GVPSRFSGSG | QQAGI | FGQGTKLE | RTVAAPSVFIFPPSDEQLKSGTASVVCL |
| X0049- | P at H52a- | | ASVGDRVTITC | YLN | GKAPKL | | SGTDFTLTIS | | IK | LNNFYPREAKVQWKVDNALQSGNSQESV |
| G01 | GLY (G) | | | | LIY | | SLQPEDFATY | | | TEQDSKDSTYSLSSTLTLSKADYEKHKV |
| | | | | | | | YC | | | YACEVTHQGLSSPVTKSFNRGEC.. |
| 539B- | X49-H01- | GVHS | DIQMTQSPSSLS | RASQSIYT | WYQQKP | AASSLQS | GVPSRFSGSG | QQAGI | FGQGTKLE | RTVAAPSVFIFPPSDEQLKSGTASVVCL |
| X0049- | P at H52a | | ASVGDRVTITC | YLN | GKAPKL | | SGTDFTLTIS | | IK | LNNFYPREAKVQWKVDNALQSGNSQESV |
| H01 | M at | | | | LIY | | SLQPEDFATY | | | TEQDSKDSTYSLSSTLTLSKADYEKHKV |
| | H34(germline)-LEU (L) | | | | | | YC | | | YACEVTHQGLSSPVTKSFNRGEC.. |
| 539B- | X49-A02- | GVHS | DIQMTQSPSSLS | RASQSIYT | WYQQKP | AASSLQS | GVPSRFSGSG | QQAGI | FGQGTKLE | RTVAAPSVFIFPPSDEQLKSGTASVVCL |
| X0049- | P at H52a | | ASVGDRVTITC | YLN | GKAPKL | | SGTDFTLTIS | | IK | LNNFYPREAKVQWKVDNALQSGNSQESV |
| A02 | M at | | | | LIY | | SLQPEDFATY | | | TEQDSKDSTYSLSSTLTLSKADYEKHKV |
| | H34(germline)-THR (T) | | | | | | YC | | | YACEVTHQGLSSPVTKSFNRGEC.. |
| 539B- | X49-B02- | GVHS | DIQMTQSPSSLS | RASQSIYT | WYQQKP | AASSLQS | GVPSRFSGSG | QQAGI | FGQGTKLE | RTVAAPSVFIFPPSDEQLKSGTASVVCL |
| X0049- | P at H52a | | ASVGDRVTITC | YLN | GKAPKL | | SGTDFTLTIS | | IK | LNNFYPREAKVQWKVDNALQSGNSQESV |
| B02 | M at H56- | | | | LIY | | SLQPEDFATY | | | TEQDSKDSTYSLSSTLTLSKADYEKHKV |
| | SER (S) | | | | | | YC | | | YACEVTHQGLSSPVTKSFNRGEC.. |
| 539B- | X49-C02- | GVHS | DIQMTQSPSSLS | RASQSIYT | WYQQKP | AASSLQS | GVPSRFSGSG | QQAGI | FGQGTKLE | RTVAAPSVFIFPPSDEQLKSGTASVVCL |
| X0049- | P at H52a | | ASVGDRVTITC | YLN | GKAPKL | | SGTDFTLTIS | | IK | LNNFYPREAKVQWKVDNALQSGNSQESV |
| C02 | M at H58- | | | | LIY | | SLQPEDFATY | | | TEQDSKDSTYSLSSTLTLSKADYEKHKV |
| | TYR (Y) | | | | | | YC | | | YACEVTHQGLSSPVTKSFNRGEC.. |
| 539B- | X49-D02- | GVHS | DIQMTQSPSSLS | RASQSIYT | WYQQKP | AASSLQS | GVPSRFSGSG | QQAGI | FGQGTKLE | RTVAAPSVFIFPPSDEQLKSGTASVVCL |
| X0049- | P at H52a | | ASVGDRVTITC | YLN | GKAPKL | | SGTDFTLTIS | | IK | LNNFYPREAKVQWKVDNALQSGNSQESV |
| D02 | M at H56, | | | | LIY | | SLQPEDFATY | | | TEQDSKDSTYSLSSTLTLSKADYEKHKV |
| | H58- | | | | | | YC | | | YACEVTHQGLSSPVTKSENRGEC.. |
| | SER, TYR (S, Y) | | | | | | | | | |
| 539B- | X49-E02- | GVHS | DIQMTQSPSSLS | RASQSIYT | WYQQKP | AASSLQS | GVPSRFSGSG | QQAGI | FGQGTKLE | RTVAAPSVFIFPPSDEQLKSGTASVVCL |
| X0049- | P at H52a | | ASVGDRVTITC | YLN | GKAPKL | | SGTDFTLTIS | | IK | LNNFYPREAKVQWKVDNALQSGNSQESV |
| E02 | M at H34, | | | | LIY | | SLQPEDFATY | | | TEQDSKDSTYSLSSTLTLSKADYEKHKV |
| | H56, H58- | | | | | | YC | | | YACEVTHQGLSSPVTKSFNRGEC.. |
| | LEU, SER, TYR (L, S, Y) | | | | | | | | | |

| Isolate | Initial Name | H-Leader | HV-FR1 | HV-CDR1 | HV-FR2 | HV-CDR2 | HV-FR3 | HV-CDR3 | HV-FR4 | H-Constant |
|---|---|---|---|---|---|---|---|---|---|---|
| 539B-X0041-D02 | 539B- | MGWSCIILFL | EVQLLESGGGLVQPGGSL | DYWMH | WVRQAPG | GISPSGGM | RFTISRDNSKNTLYLQ | DIVGPYSAGLFDY | WGRGTLVT | ASTKGPSV |
| | X0041-D02 | VATATGAHS | RLSCAASGFTFS | | KGLEWVS | TMYADSVKG | MNSLRAEDTAVYYCAR | | VSS | FPLAPSSKS |
| 539B-X0049-A01 | X49-A01- | MGWSCIILFL | EVQLLESGGGLVQPGGSL | DYWLH | WVRQAPG | GISPSGGM | RFTISRDNSKNTLYLQ | DIVGPYSAGLFDY | WGRGTLVT | ASTKGPSV |
| | M at | VATATGAHS | RLSCAASGFTFS | | KGLEWVS | TMYADSVKG | MNSLRAEDTAVYYCAR | | VSS | FPLAPSSKS |
| | H34(germline)-LEU (L) | | | | | | | | | |
| 539B- | X49-B01- | MGWSCIILFL | EVQLLESGGGLVQPGGSL | DYWTH | WVRQAPG | GISPSGGM | RFTISRDNSKNTLYLQ | DIVGPYSAGLFDY | WGRGTLVT | ASTKGPSV |
| X0049- | M at | VATATGAHS | RLSCAASGFTFS | | KGLEWVS | TMYADSVKG | MNSLRAEDTAVYYCAR | | VSS | FPLAPSSKS |
| B01 | H34(germline)-THR (T) | | | | | | | | | |
| 539B-X0049-C01 | X49-C01- | MGWSCIILFL | EVQLLESGGGLVQPGGSL | DYWMH | WVRQAPG | GISPSGGS | RFTISRDNSKNTLYLQ | DIVGPYSAGLFDY | WGRGTLVT | ASTKGPSV |
| | M at H56-SER (S) | VATATGAHS | RLSCAASGFTFS | | KGLEWVS | TMYADSVKG | MNSLRAEDTAVYYCAR | | VSS | FPLAPSSKS |
| 539B- | X49-D01- | MGWSCIILFL | EVQLLESGGGLVQPGGSL | DYWMH | WVRQAPG | GISPSGGM | RFTISRDNSKNTLYLQ | DIVGPYSAGLFDY | WGRGTLVT | ASTKGPSV |
| X0049- | M at H58- | VATATGAHS | RLSCAASGFTFS | | KGLEWVS | TYYADSVKG | MNSLRAEDTAVYYCAR | | VSS | FPLAPSSKS |
| D01 | TYR (Y) | | | | | | | | | |
| 539B- | X49-E01- | MGWSCIILFL | EVQLLESGGGLVQPGGSL | DYWMH | WVRQAPG | GISPSGGS | RFTISRDNSKNTLYLQ | DIVGPYSAGLFDY | WGRGTLVT | ASTKGPSV |
| X0049- | M at H56, | VATATGAHS | RLSCAASGFTFS | | KGLEWVS | TYYADSVKG | MNSLRAEDTAVYYCAR | | VSS | FPLAPSSKS |
| E01 | H58- | | | | | | | | | |
| | SER, TYR | | | | | | | | | |
| | (S, Y) | | | | | | | | | |
| 539B- | X49-F01- | MGWSCIILFL | EVQLLESGGGLVQPGGSL | DYWLH | WVRQAPG | GISPSGGS | RFTISRDNSKNTLYLQ | DIVGPYSAGLFDY | WGRGTLVT | ASTKGPSV |
| X0049- | M at H34, | VATATGAHS | RLSCAASGFTFS | | KGLEWVS | TYYADSVKG | MNSLRAEDTAVYYCAR | | VSS | FPLAPSSKS |
| F01 | H56, H58- | | | | | | | | | |
| | LEU, SER, | | | | | | | | | |
| | TYR | | | | | | | | | |
| | (L, S, Y) | | | | | | | | | |
| 539B- | X49-G01- | MGWSCIILFL | EVQLLESGGGLVQPGGSL | DYWMH | WVRQAPG | GISGSGGM | RFTISRDNSKNTLYLQ | DIVGPYSAGLFDY | WGRGTLVT | ASTKGPSV |
| X0049- | P at H52a- | VATATGAHS | RLSCAASGFTFS | | KGLEWVS | TMYADSVKG | MNSLRAEDTAVYYCAR | | VSS | FPLAPSSKS |
| G01 | GLY (G) | | | | | | | | | |
| 539B- | X49-H01- | MGWSCIILFL | EVQLLESGGGLVQPGGSL | DYWML | WVRQAPG | GISGSGGM | RFTISRDNSKNTLYLQ | DIVGPYSAGLFDY | WGRGTLVT | ASTKGPSV |
| X0049- | P at H52a | VATATGAHS | RLSCAASGFTFS | | KGLEWVS | TMYADSVKG | MNSLRAEDTAVYYCAR | | VSS | FPLAPSSKS |
| H01 | M at | | | | | | | | | |
| | H34(germline)- | | | | | | | | | |
| | LEU | | | | | | | | | |
| | (L) | | | | | | | | | |
| 539B- | X49-A02- | MGWSCIILFL | EVQLLESGGGLVQPGGSL | DYWTH | WVRQAPG | GISGSGGM | RFTISRDNSKNTLYLQ | DIVGPYSAGLFDY | WGRGTLVT | ASTKGPSV |
| X0049- | P at H52a | VATATGAHS | RLSCAASGFTFS | | KGLEWVS | TMYADSVKG | MNSLRAEDTAVYYCAR | | VSS | FPLAPSSKS |
| A02 | M at | | | | | | | | | |
| | H34(germline)- | | | | | | | | | |
| | THR | | | | | | | | | |
| | (T) | | | | | | | | | |
| 539B- | X49-B02- | MGWSCIILFL | EVQLLESGGGLVQPGGSL | DYWMH | WVRQAPG | GISGSGGS | RFTISRDNSKNTLYLQ | DIVGPYSAGLFDY | WGRGTLVT | ASTKGPSV |
| X0049- | P at H52a | VATATGAHS | RLSCAASGFTFS | | KGLEWVS | TYYADSVKG | MNSLRAEDTAVYYCAR | | VSS | FPLAPSSKS |
| B02 | M at H56- | | | | | | | | | |
| | SER (S) | | | | | | | | | |
| 539B- | X49-C02- | MGWSCIILFL | EVQLLESGGGLVQPGGSL | DYWMH | WVRQAPG | GISGSGGS | RFTISRDNSKNTLYLQ | DIVGPYSAGLFDY | WGRGTLVT | ASTKGPSV |
| X0049- | P at H52a | VATATGAHS | RLSCAASGFTFS | | KGLEWVS | TYYADSVKG | MNSLRAEDTAVYYCAR | | VSS | FPLAPSSKS |
| C02 | M at H58- | | | | | | | | | |
| | TYR (Y) | | | | | | | | | |
| 539B- | X49-D02- | MGWSCIILFL | EVQLLESGGGLVQPGGSL | DYWMH | WVRQAPG | GISGSGGS | RFTISRDNSKNTLYLQ | DIVGPYSAGLFDY | WGRGTLVT | ASTKGPSV |
| X0049- | P at H52a | VATATGAHS | RLSCAASGFTFS | | KGLEWVS | TYYADSVKG | MNSLRAEDTAVYYCAR | | VSS | FPLAPSSKS |
| D02 | M at H56, | | | | | | | | | |
| | H58-SER, TYR (S, Y) | | | | | | | | | |
| 539B-X0049-E02 | X49-E02- | MGWSCIILFL | EVQLLESGGGLVQPGGSL | DYWLH | WVRQAPG | GISGSGGS | RFTISRDNSKNTLYLQ | DIVGPYSAGLFDY | WGRGTLVT | ASTKGPSV |
| | P at H52a M at H34, | VATATGAHS | RLSCAASGFTFS | | KGLEWVS | TYYADSVKG | MNSLRAEDTAVYYCAR | | VSS | FPLAPSSKS |
| | H56, H58-LEU, | | | | | | | | | |
| | SER, TYR (L, S, Y) | | | | | | | | | |

| Isolate | Initial Name | LV-AA | HV-AA |
|---|---|---|---|
| 539B-X0041-D02 | 539B-X0041-D02 | DIQMTQSPSSLSASVGDRVTITCRASQSIYTYLNW | EVQLLESGGGLVQPGGSLRLSCAASGFTFSDYWMHWVRQAPGKGLEWVSGISP |
| | | YQQKPGKAPKLLIYAASSLQSGVPSRFSGSGSGTD | SGGMTMYADSVKGRFTISRDNSKNTLYLQMNSLRAEDTAVYYCARDIVGPYSA |
| | | FTLTISSLQPEDFATYYCQQAGIFGQGTKLEIK | GLFDYWGRGTLVTVSS |
| 539B-X0049-A01 | X49-A01-M | DIQMTQSPSSLSASVGDRVTITCRASQSIYTYLNW | EVQLLESGGGLVQPGGSLRLSCAASGFTFSDYWMHWVRQAPGKGLEWVSGISP |
| | at H34(germline)-LEU (L) | YQQKPGKAPKLLIYAASSLQSGVPSRFSGSGSGTD | SGGMTMYADSVKGRFTISRDNSKNTLYLQMNSLRAEDTAVYYCARDIVGPYSA |
| | | FTLTISSLQPEDFATYYCQQAGIFGQGTKLEIK | GLFDYWGRGTLVTVSS |
| 539B-X0049-B01 | X49-B01-M | DIQMTQSPSSLSASVGDRVTITCRASQSIYTYLNW | EVQLLESGGGLVQPGGSLRLSCAASGFTFSDYWMHWVRQAPGKGLEWVSGISP |
| | at H34(germline)-THR (T) | YQQKPGKAPKLLIYAASSLOSGVPSRFSGSGSGTD | SGGMTMYADSVKGRFTISRDNSKNTLYLQMNSLRAEDTAVYYCARDIVGPYSA |
| | | FTLTISSLQPEDFATYYCQQAGIFGQGTKLEIK | GLFDYWGRGTLVTVSS |
| 539B-X0049-C01 | X49-C01-M | DIQMTQSPSSLSASVGDRVTITCRASQSIYTYLNW | EVQLLESGGGLVQPGGSLRLSCAASGFTFSDYWMHWVRQAPGKGLEWVSGISP |
| | at H56- | YQQKPGKAPKLLIYAASSLQSGVPSRFSGSGSGTD | SGGMTMYADSVKGRFTISRDNSKNTLYLQMNSLRAEDTAVYYCARDIVGPYSA |
| | SER (S) | FTLTISSLQPEDFATYYCQQAGIFGQGTKLEIK | GLFDYWGRGTLVTVSS |
| 539B- | X49-D01-M | DIQMTQSPSSLSASVGDRVTITCRASQSIYTYLNW | EVQLLESGGGLVQPGGSLRLSCAASGFTFSDYWMHWVRQAPGKGLEWVSGISP |
| X0049- | at H58- | YQQKPGKAPKLLIYAASSLQSGVPSRFSGSGSGTD | SGGMTMYADSVKGRFTISRDNSKNTLYLQMNSLRAEDTAVYYCARDIVGPYSA |
| D01 | TYR (Y) | FTLTISSLQPEDFATYYCQOAGIFGQGTKLEIK | GLFDYWGRGTLVTVSS |
| 539B- | X49-E01-M | DIQMTQSPSSLSASVGDRVTITCRASQSIYTYLNW | EVQLLESGGGLVQPGGSLRLSCAASGFTFSDYWMHWVRQAPGKGLEWVSGISP |
| X0049- | at H56, H58- | YQQKPGKAPKLLIYAASSLQSGVPSRFSGSGSGTD | SGGMTMYADSVKGRFTISRDNSKNTLYLQMNSLRAEDTAVYYCARDIVGPYSA |
| E01 | SER, TYR | FTLTISSLQPEDFATYYCQQAGIFGQGTKLEIK | GLFDYWGRGTLVTVSS |
| | (S, Y) | | |
| 539B- | X49-F01-M | DIQMTQSPSSLSASVGDRVTITCRASQSIYTYLNW | EVQLLESGGGLVQPGGSLRLSCAASGFTFSDYWMHWVRQAPGKGLEWVSGISP |
| X0049- | at H34, H56, | YQQKPGKAPKLLIYAASSLQSGVPSRFSGSGSGTD | SGGMTMYADSVKGRFTISRDNSKNTLYLQMNSLRAEDTAVYYCARDIVGPYSA |
| F01 | H58-LEU, | FTLTISSLQPEDFATYYCQQAGIFGQGTKLEIK | GLFDYWGRGTLVTVSS |
| | SER, TYR (L, S, Y) | | |
| 539B- | X49-G01-P | DIQMTQSPSSLSASVGDRVTITCRASQSIYTYLNW | EVQLLESGGGLVQPGGSLRLSCAASGFTFSDYWMHWVRQAPGKGLEWVSGISP |
| X0049- | at H52a- | YQQKPGKAPKLLIYAASSLQSGVPSRFSGSGSGTD | SGGMTMYADSVKGRFTISRDNSKNTLYLQMNSLRAEDTAVYYCARDIVGPYSA |
| G01 | GLY (G) | FTLTISSLQPEDFATYYCQQAGIFGOGTKLEIK | GLFDYWGRGTLVTVSS |
| 539B- | X49-H01-P | DIQMTQSPSSLSASVGDRVTITCRASQSIYTYLNW | EVQLLESGGGLVQPGGSLRLSCAASGFTFSDYWMHWVRQAPGKGLEWVSGISP |
| X0049- | at H52a M at H34 (germline)-LEU (L) | YQQKPGKAPKLLIYAASSLQSGVPSRFSGSGSGTD | SGGMTMYADSVKGRFTISRDNSKNTLYLQMNSLRAEDTAVYYCARDIVGPYSA |
| H01 | | FTLTISSLQPEDFATYYCQQAGIFGQGTKLEIK | GLFDYWGRGTLVTVSS |
| 539B- | X49-A02-P | DIQMTQSPSSLSASVGDRVTITCRASQSIYTYLNW | EVQLLESGGGLVQPGGSLRLSCAASGFTFSDYWMHWVRQAPGKGLEWVSGISP |
| X0049- | at H52a M at | YQQKPGKAPKLLIYAASSLQSGVPSRFSGSGSGTD | SGGMTMYADSVKGRFTISRDNSKNTLYLQMNSLRAEDTAVYYCARDIVGPYSA |
| A02 | H34(germline)- | FTLTISSLQPEDFATYYCQQAGIFGQGTKLEIK | GLFDYWGRGTLVTVSS |
| | THR (T) | | |
| 539B- | X49-B02-P | DIQMTQSPSSLSASVGDRVTITCRASQSIYTYLNW | EVQLLESGGGLVQPGGSLRLSCAASGFTFSDYWMHWVRQAPGKGLEWVSGISP |
| X0049- | at H52a M at H56-SER (S) | YQQKPGKAPKLLIYAASSLQSGVPSRFSGSGSGTD | SGGMTMYADSVKGRFTISRDNSKNTLYLQMNSLRAEDTAVYYCARDIVGPYSA |
| B02 | | FTLTISSLQPEDFATYYCQQAGIFGQGTKLEIK | GLFDYWGRGTLVTVSS |
| 539B- | X49-C02-P at H52a M at H58-TYR (Y) | DIQMTQSPSSLSASVGDRVTITCRASQSIYTYLNW | EVQLLESGGGLVQPGGSLRLSCAASGFTFSDYWMHWVRQAPGKGLEWVSGISP |
| X0049- | | YQQKPGKAPKLLIYAASSLQSGVPSRFSGSGSGTD | SGGMTMYADSVKGRFTISRDNSKNTLYLQMNSLRAEDTAVYYCARDIVGPYSA |
| C02 | | FTLTISSLQPEDFATYYCQQAGIFGQGTKLEIK | GLFDYWGRGTLVTVSS |
| 539B-X0049-D02 | X49Y-D02-P | DIQMTQSPSSLSASVGDRVTITCRASQSIYTYLNM | EVQLLESGGGLVQPGGSLRLSCAASGFTFSDYWMHWVRQAPGKGLEWVSGISP |
| | at H52a M at H56, H58-SER, TYR | YQQKPGKAPKLLIYAASSLQSGVPSRFSGSGSGTD | SGGMTMYADSVKGRFTISRDNSKNTLYLQMNSLRAEDTAVYYCARDIVGPYSA |
| | (S, Y) | FTLTISSLQPEDFATYYCQQAGIFGQGTKLEIK | GLFDYWGRGTLVTVSS |
| 539B-X0049-E02 | X49-E02-P | DIQMTQSPSSLSASVGDRVTITCRASQSIYTYLNW | EVQLLESGGGLVQPGGSLRLSCAASGFTFSDYWMHWVRQAPGKGLEWVSGISP |
| | at H52a M at | YQQKPGKAPKLLIYAASSLQSGVPSRFSGSGSGTD | SGGMTMYADSVKGRFTISRDNSKNTLYLQMNSLRAEDTAVYYCARDIVGPYSA |
| | H34, H56, H58-LEU, SER, TYR | FTLTISSLQPEDFATYYCQQAGIFGQGTKLEIK | GLFDYWGRGTLVTVSS |
| | (L, S, Y) | | |

The application's sequence listing, which the Patent Office published only in electronic form, follows.

SEQUENCE LISTING (3402 sequences)

SEQ ID NO: 1 - protein, 58 aa, Artificial Sequence
  Description of Artificial Sequence: Synthetic polypeptide
MHSFCAFKAETGPCRARFDRWFFNIFTRQCEEFIYGGCEGNQNRFESLEECKKMCTRD

SEQ ID NO: 2 - DNA, 1693 bp, Homo sapiens
atgaagtttcttctaatactgctcctgcaggccactgcttctggagctcttcccctgaacagctctacaagcctggaaaaaaataatgtgctatttggtgaaagatacttagaaaaattttatggccttgagataaacaaacttccagtgacaaaaatgaaatatagtggaaacttaatgaaggaaaaaatccaagaaatgcagcacttcttgggtctgaaagtgaccgggcaactggacacatctaccctggagatgatgcacgcacctcgatgtggagtccccgatgtccatcatttcagggaaatgccaggggggcccgtatggaggaaacattatatcacctacagaatcaataattacacacctgacatgaaccgtgaggatgttgactacgcaatccggaaagctttccaagtatggagtaatgttacccccttgaaattcagcaagattaacacaggcatggctgacattttggtggtttttgcccgtggagctcatggagacttccatgcttttgatggcaaaggtggaatcctagcccatgcttttggacctggatctggcattggaggggatgcacatttcgatgaggacgaattctggactacacattcaggaggcacaaacttgttcctcactgctgttcacgagattggccattccttaggtcttggccattctagtgatccaaaggccgtaatgttccccacctacaaatatgttgacatcaacacatttcgcctctctgctgatgacatacgtggcattcagtccctgtatggagacccaaaagagaaccaacgcttgccaaatcctgacaattcagaaccagctctctgtgaccccaatttgagttttgatgctgtcactaccgtgggaaataagatctttttcttcaaagacaggttcttctggctgaaggtttctgagagaccaaagaccagtgttaatttaatttcttccttatggccaaccttgccatctggcattgaagctgcttatgaaattgaagccagaaatcaagtttttctttttaaagatgacaaatactggttaattagcaatttaagaccagagccaaattatcccaagagcatacattcttttggttttcctaactttgtgaaaaaaattgatgcagctgtttttaacccacgtttttataggacctacttctttgtagataaccagtattggaggtatgatgaaaggagacagatgatggaccctggttatcccaaactgattaccaagaacttccaaggaatcgggcctaaaattgatgcagtcttctactctaaaaacaaatactactatttcttccaaggatctaaccaatttgaatatgacttcctactccaacgtatcaccaaaacactgaaaagcaatagctggtttggttgttagaaatggtgtaattaatggtttttgttagttcacttcagcttaataagtatttattgcatatttgctatgtcctcagtgtaccactacttagagatatgtatcataaaaataaaatctgtaaaccataggtaatgattatataaaatacataatatttttcaattttgaaaactctaattgtccattcttgcttgactctactattaagtttgaaaatagttaccttcaaaggccaagagaattctatttgaagcatgctctgtaagttgcttcctaacat

SEQ ID NO: 3 - protein, 470 aa, Homo sapiens
MKFLLILLLQATASGALPLNSSTSLEKNNVLFGERYLEKFYGLEINKLPVTKMKYSGNLMKEKIQEMQHFLGLKVTGQLDTSTLEMMHAPRCGVPDVHHFREMPGGPVWRKHYITYRINNYTPDMNREDVDYAIRKAFQVWSNVTPLKFSKINTGMADILVVFARGAHGDFHAFDGKGGILAHAFGPGSGIGGDAHFDEDEFWTTHSGGTNLFLTAVHEIGHSLGLGHSSDPKAVMFPTYKYVDINTFRLSADDIRGIQSLYGDPKENQRLPNPDNSEPALCDPNLSFDAVTTVGNKIFFFKDRFFWLKVSERPKTSVNLISSLWPTLPSGIEAAYEIEARNQVFLFKDDKYWLISNLRPEPNYPKSIHSFGFPNFVKKIDAAVFNPRFYRTYFFVDNQYWRYDERRQMMDPGYPKLITKNFQGIGPKIDAVFYSKNKYYYFFQGSNQFEYDFLLQRITKTLKSNSWFGC

SEQ ID NO: 4 - DNA, 1410 bp, Mus musculus
actctgctgaaaggagtctgcacaatgaaatttctcatgatgattgtgttcttacaggtatctgcctgtggggctgctcccatgaatgacagtgaatttgctgaatggtacttgtcaagattttatgattatggaaaggacagaattccaatgacaaaaacaaaaaccaatagaaacttcctaaaagaaaaactccaggaaatgcagcagttctttgggctagaagcaactgggcaactggacaactcaactctggcaataatgcacatccctcgatgtggagtgcccgatgtacagcatcttagagcagtgccccagaggtcaagatggatgaagcggtacctcacttacaggatctataattacactccggacatgaagcgtgaggatgtagactacatatttcagaaagctttccaagtctggagtgatgtgactcctctaagattcagaaagcttcataaagatgaggctgacattatgatactttttgcatttggagctcacggagacttcaactattttgatggcaaaggtggtacactagcccatgctttttatcctggacctggtattcaaggagatgcacattttgatgaggcagaaacgtggactaaaagttttcaaggcacaaacctcttccttgttgctgttcatgaacttggccattccttggggctgcagcattccaataatccaaagtcaataatgtaccccacctacagataccttaaccccagcacatttcgcctctctgctgatgacatacgtaacattcagtccctctatggagccccagtgaaacccccatccttgacaaaacctagcagtccaccatcaactttctgtcaccaaagcttgagttttgatgctgtcacaacagtgggagagaaaatctttttctttaaagactggttcttctggtggaagcttcctgggagtccagccaccaacattacttctatttcttccatatggccaagcatcccatctggtattcaagctgcttacgaaattgaaagcagaaatcaacttttcctttttaaagatgagaagtactggttaataaacaacttagtaccagagccacactatcccaggagcatatattccctgggcttctctgcatctgtgaagaaggttgatgcagctgtctttgacccacttcgccaaaaggtttatttctttgtggataaacactactggaggtatgatgtgaggcaggagctcatggaccctgcttaccccaagctgatttccacacacttcccaggaatcaagcctaaaattgatgcagtcctctatttcaaaagacactactacatcttccaaggagcctatcaattggaatatgaccccctgttccgtcgtgtcaccaaaacattgaaaagtacaagctggtttggttgt

SEQ ID NO: 5 - protein, 462 aa, Mus musculus
MKFLMMIVFLQVSACGAAPMNDSEFAEWYLSRFYDYGKDRIPMTKTKTNRNFLKEKLQEMQQFFGLEATGQLDNSTLAIMHIPRCGVPDVQHLRAVPQRSRWMKRYLTYRIYNYTPDMKREDVDYIFQKAFQVWSDVTPLRFRKLHKDEADIMILFAFGAHGDFNYFDGKGGTLAHAFYPGPGIQGDAHFDEAETWTKSFQGTNLFLVAVHELGHSLGLQHSNNPKSIMYPTYRYLNPSTFRLSADDIRNIQSLYGAPVKPPSLTKPSSPPSTFCHQSLSFDAVTTVGEKIFFFKDWFFWWKLPGSPATNITSISSIWPSIPSGIQAAYEIESRNQLFLFKDEKYWLINNLVPEPHYPRSIYSLGFSASVKKVDAAVFDPLRQKVYFFVDKHYWRYDVRQELMDPAYPKLISTHFPGIKPKIDAVLYFKRHYYIFQGAYQLEYDPLFRRVTKTLKSTSWFGC

SEQ ID NO: 6 - protein, 8 aa, Artificial Sequence
  Description of Artificial Sequence: Synthetic peptide
  MOD_RES (1)..(1): 7-Methoxycoumarin-4-acetyl-Pro
  MOD_RES (4)..(4): Cys(4-Methoxybenzyl)
  MOD_RES (8)..(8): Diaminopropionyl(dinitrophenyl)
PLACWARX

SEQ ID NO: 7 - protein, 12 aa, Artificial Sequence
  Description of Artificial Sequence: Synthetic peptide
GDAHFDEDEFWT

SEQ ID NO: 8 - protein, 18 aa, Artificial Sequence
  Description of Artificial Sequence: Synthetic peptide
GTNLFLTAVHEIGHSLGL

SEQ ID NO: 9 - protein, 12 aa, Artificial Sequence
  Description of Artificial Sequence: Synthetic peptide
HEIGHSLGLGHS

SEQ ID NO: 10 - protein, 18 aa, Artificial Sequence
  Description of Artificial Sequence: Synthetic peptide
TYRINNYTPDMNREDVDY

SEQ ID NO: 11 - protein, 17 aa, Artificial Sequence
  Description of Artificial Sequence: Synthetic peptide
TFRLSADDIRGIQSLYG

SEQ ID NO: 12 - protein, 5 aa, Artificial Sequence
  Description of Artificial Sequence: Synthetic peptide
DYNMH

SEQ ID NO: 13 - protein, 5 aa, Artificial Sequence
  Description of Artificial Sequence: Synthetic peptide
WYWMG

SEQ ID NO: 14 - protein, 5 aa, Artificial Sequence
  Description of Artificial Sequence: Synthetic peptide
PYWMH

SEQ ID NO: 15 - protein, 5 aa, Artificial Sequence
  Description of Artificial Sequence: Synthetic peptide
PYWMS

SEQ ID NO: 16 - protein, 5 aa, Artificial Sequence
  Description of Artificial Sequence: Synthetic peptide
WYWMV

SEQ ID NO: 17 - protein, 5 aa, Artificial Sequence
  Description of Artificial Sequence: Synthetic peptide
WYNMH

SEQ ID NO: 18 - protein, 5 aa, Artificial Sequence
  Description of Artificial Sequence: Synthetic peptide
WYGMG

SEQ ID NO: 19 - protein, 5 aa, Artificial Sequence
  Description of Artificial Sequence: Synthetic peptide
YYGMG

SEQ ID NO: 20 - protein, 5 aa, Artificial Sequence
  Description of Artificial Sequence: Synthetic peptide
WYWMH

SEQ ID NO: 21 - protein, 5 aa, Artificial Sequence
  Description of Artificial Sequence: Synthetic peptide
WYNMS

SEQ ID NO: 22 - protein, 5 aa, Artificial Sequence
  Description of Artificial Sequence: Synthetic peptide
YYNMH

SEQ ID NO: 23 - protein, 5 aa, Artificial Sequence
  Description of Artificial Sequence: Synthetic peptide
LYHMH

SEQ ID NO: 24 - protein, 5 aa, Artificial Sequence
  Description of Artificial Sequence: Synthetic peptide
EYWMT

SEQ ID NO: 25 - protein, 5 aa, Artificial Sequence
  Description of Artificial Sequence: Synthetic peptide
PYWMH

SEQ ID NO: 26 - protein, 5 aa, Artificial Sequence
  Description of Artificial Sequence: Synthetic peptide
PYWMH

SEQ ID NO: 27 - protein, 17 aa, Artificial Sequence
  Description of Artificial Sequence: Synthetic peptide
YIGPSGGYTHYADSVKG

SEQ ID NO: 28 - protein, 17 aa, Artificial Sequence
  Description of Artificial Sequence: Synthetic peptide
SISPSGGYTFYADSVKG

SEQ ID NO: 29 - protein, 17 aa, Artificial Sequence
  Description of Artificial Sequence: Synthetic peptide
GIGPSGGLTFYADSVKG

SEQ ID NO: 30 - protein, 17 aa, Artificial Sequence
  Description of Artificial Sequence: Synthetic peptide
GISPSGGITFYADSVKG

SEQ ID NO: 31 - protein, 17 aa, Artificial Sequence
  Description of Artificial Sequence: Synthetic peptide
SIGPSGGDTYYADSVKG

SEQ ID NO: 32 - protein, 17 aa, Artificial Sequence
  Description of Artificial Sequence: Synthetic peptide
GISPSGGNTMYADSVKG

SEQ ID NO: 33 - protein, 17 aa, Artificial Sequence
  Description of Artificial Sequence: Synthetic peptide
VIVSSGGFTQYADSVKG

SEQ ID NO: 34 - protein, 17 aa, Artificial Sequence
  Description of Artificial Sequence: Synthetic peptide
VISSSGGFTFYADSVKG

SEQ ID NO: 35 - protein, 17 aa, Artificial Sequence
  Description of Artificial Sequence: Synthetic peptide
GIVSSGGTTIYADSVKG

SEQ ID NO: 36 - protein, 17 aa, Artificial Sequence
  Description of Artificial Sequence: Synthetic peptide
RISPSGGDTGYADSVKG

SEQ ID NO: 37 - protein, 17 aa, Artificial Sequence
  Description of Artificial Sequence: Synthetic peptide
GIGPSGGGTLYADSVKG

SEQ ID NO: 38 - protein, 17 aa, Artificial Sequence
  Description of Artificial Sequence: Synthetic peptide
GIGPSGGWTIYADSVKG

SEQ ID NO: 39 - protein, 17 aa, Artificial Sequence
  Description of Artificial Sequence: Synthetic peptide
GISPSGGMTFYADSVKG

SEQ ID NO: 40 - protein, 17 aa, Artificial Sequence
  Description of Artificial Sequence: Synthetic peptide
GISSSGGDTLYADSVKG

SEQ ID NO: 41 - protein, 17 aa, Artificial Sequence
  Description of Artificial Sequence: Synthetic peptide
GIGPSGGPTFYADSIKG

SEQ ID NO: 42 - protein, 35 aa, Artificial Sequence
  Description of Artificial Sequence: Synthetic polypeptide
DYNMHYIGPSGGYTHYADSVKGDIRGAYSSGLFDY

SEQ ID NO: 43 - protein, 35 aa, Artificial Sequence
  Description of Artificial Sequence: Synthetic polypeptide
WYWMHGISPSGGMTMYADSVKGDIVGPYSAGLFDY

SEQ ID NO: 44 - protein, 35 aa, Artificial Sequence
  Description of Artificial Sequence: Synthetic polypeptide
WYGMHGIVSSGGETFYADSVKGDIRGVFLSGLFDH

SEQ ID NO: 45 - protein, 35 aa, Artificial Sequence
  Description of Artificial Sequence: Synthetic polypeptide
YYNMHGISPSGGTTFYADSVKGDITGAYSAGLFDL

SEQ ID NO: 46 - protein, 35 aa, Artificial Sequence
  Description of Artificial Sequence: Synthetic polypeptide
EYNMHGIVPSGGLTHYADSVKGDIRGAYSAGIFDY

SEQ ID NO: 47 - protein, 662 aa, Artificial Sequence
  Description of Artificial Sequence: Synthetic polypeptide
DIQMTQSPSSLSASVGDRVTITCRASQSIYTYLNWYQQKPGKAPKLLIYAASSLQSGVPSRFSGSGSGTDFTLTISSLQPEDFATYYCQQAGIFGQGTKLEIKRTVAAPSVFIFPPSDEQLKSGTASVVCLLNNFYPREAKVQWKVDNALQSGNSQESVTEQDSKDSTYSLSSTLTLSKADYEKHKVYACEVTHQGLSSPVTKSFNRGECEVQLLESGGGLVQPGGSLRLSCAASGFTFSWYWMHWVRQAPGKGLEWVSGISPSGGMTMYADSVKGRFTISRDNSKNTLYLQMNSLRAEDTAVYYCARDIVGPYSAGLFDYWGRGTLVTVSSASTKGPSVFPLAPSSKSTSGGTAALGCLVKDYFPEPVTVSWNSGALTSGVHTFPAVLQSSGLYSLSSVVTVPSSSLGTQTYICNVNHKPSNTKVDKRVEPKSCDKTHTCPPCPAPELLGGPSVFLFPPKPKDTLMISRTPEVTCVVVDVSHEDPEVKFNWYVDGVEVHNAKTKPREEQYNSTYRVVSVLTVLHQDWLNGKEYKCKVSNKALPAPIEKTISKAKGQPREPQVYTLPPSREEMTKNQVSLTCLVKGFYPSDIAVEWESNGQPENNYKTTPPVLDSDGSFFLYSKLTVDKSRWQQGNVFSCSVMHEALHNHYTQKSLSLSPGK

SEQ ID NO: 48 - protein, 662 aa, Artificial Sequence
  Description of Artificial Sequence: Synthetic polypeptide
DIQMTQSPSSLSASVGDRVTITCRASQSIYTYLNWYQQKPGKAPKLLIYAASSLQSGVPSRFSGSGSGTDFTLTISSLQPEDFATYYCQQAGIFGQGTKLEIKRTVAAPSVFIFPPSDEQLKSGTASVVCLLNNFYPREAKVQWKVDNALQSGNSQESVTEQDSKDSTYSLSSTLTLSKADYEKHKVYACEVTHQGLSSPVTKSFNRGECEVQLLESGGGLVQPGGSLRLSCAASGFTFSDYNMHWVRQAPGKGLEWVSYIGPSGGYTHYADSVKGRFTISRDNSKNTLYLQMNSLRAEDTAVYYCAKDIRGAYSSGLFDYWGRGTLVTVSSASTKGPSVFPLAPSSKSTSGGTAALGCLVKDYFPEPVTVSWNSGALTSGVHTFPAVLQSSGLYSLSSVVTVPSSSLGTQTYICNVNHKPSNTKVDKRVEPKSCDKTHTCPPCPAPELLGGPSVFLFPPKPKDTLMISRTPEVTCVVVDVSHEDPEVKFNWYVDGVEVHNAKTKPREEQYNSTYRVVSVLTVLHQDWLNGKEYKCKVSNKALPAPIEKTISKAKGQPREPQVYTLPPSREEMTKNQVSLTCLVKGFYPSDIAVEWESNGQPENNYKTTPPVLDSDGSFFLYSKLTVDKSRWQQGNVFSCSVMHEALHNHYTQKSLSLSPGK

SEQ ID NO: 49 - protein, 662 aa, Artificial Sequence
  Description of Artificial Sequence: Synthetic polypeptide
DIQMTQSPSSLSASVGDRVTITCRASQSIYTYLNWYQQKPGKAPKLLIYAASSLQSGVPSRFSGSGSGTDFTLTISSLQPEDFATYYCQQAGIFGQGTKLEIKRTVAAPSVFIFPPSDEQLKSGTASVVCLLNNFYPREAKVQWKVDNALQSGNSQESVTEQDSKDSTYSLSSTLTLSKADYEKHKVYACEVTHQGLSSPVTKSFNRGECEVQLLESGGGLVQPGGSLRLSCAASGFTFSWYGMHWVRQAPGKGLEWVSGIVSSGGETFYADSVKGRFTISRDNSKNTLYLQMNSLRAEDTAVYYCAKDIRGVFLSGLFDHWGRGTLVTVSSASTKGPSVFPLAPSSKSTSGGTAALGCLVKDYFPEPVTVSWNSGALTSGVHTFPAVLQSSGLYSLSSVVTVPSSSLGTQTYICNVNHKPSNTKVDKRVEPKSCDKTHTCPPCPAPELLGGPSVFLFPPKPKDTLMISRTPEVTCVVVDVSHEDPEVKFNWYVDGVEVHNAKTKPREEQYNSTYRVVSVLTVLHQDWLNGKEYKCKVSNKALPAPIEKTISKAKGQPREPQVYTLPPSREEMTKNQVSLTCLVKGFYPSDIAVEWESNGQPENNYKTTPPVLDSDGSFFLYSKLTVDKSRWQQGNVFSCSVMHEALHNHYTQKSLSLSPGK

SEQ ID NO: 50 - protein, 24 aa, Artificial Sequence
  Description of Artificial Sequence: Synthetic peptide
QDIQMTQSPSSLSASVGDRVTITC

SEQ ID NO: 51 - protein, 24 aa, Artificial Sequence
  Description of Artificial Sequence: Synthetic peptide
QDIQMTQSPSSLSASVGDRVTITC

SEQ ID NO: 52 - protein, 24 aa, Artificial Sequence
  Description of Artificial Sequence: Synthetic peptide
QDIQMTQSPSSLSASVGDRVTITC

SEQ ID NO: 53 - protein, 24 aa, Artificial Sequence
  Description of Artificial Sequence: Synthetic peptide
QDIQMTQSPSSLSASVGDRVTITC

SEQ ID NO: 54 - protein, 24 aa, Artificial Sequence
  Description of Artificial Sequence: Synthetic peptide
QDIQMTQSPSSLSASVGDRVTITC

SEQ ID NO: 55 - protein, 24 aa, Artificial Sequence
  Description of Artificial Sequence: Synthetic peptide
QDIQMTQSPSSLSASVGDRVTITC

SEQ ID NO: 56 - protein, 24 aa, Artificial Sequence
  Description of Artificial Sequence: Synthetic peptide
QDIQMTQSPSSLSASVGDRVTITC

SEQ ID NO: 57 - protein, 24 aa, Artificial Sequence
  Description of Artificial Sequence: Synthetic peptide
QDIQMTQSPSSLSASVGDRVTITC

SEQ ID NO: 58 - protein, 24 aa, Artificial Sequence
  Description of Artificial Sequence: Synthetic peptide
QDIQMTQSPSSLSASVGDRVTITC

SEQ ID NO: 59 - protein, 24 aa, Artificial Sequence
  Description of Artificial Sequence: Synthetic peptide
QDIQMTQSPSSLSASVGDRVTITC

SEQ ID NO: 60 - protein, 24 aa, Artificial Sequence
  Description of Artificial Sequence: Synthetic peptide
QDIQMTQSPSSLSASVGDRVTITC

SEQ ID NO: 61 - protein, 24 aa, Artificial Sequence
  Description of Artificial Sequence: Synthetic peptide
QDIQMTQSPSSLSASVGDRVTITC

SEQ ID NO: 62 - protein, 24 aa, Artificial Sequence
  Description of Artificial Sequence: Synthetic peptide
QDIQMTQSPSSLSASVGDRVTITC

SEQ ID NO: 63 - protein, 24 aa, Artificial Sequence
  Description of Artificial Sequence: Synthetic peptide
QDIQMTQSPSSLSASVGDRVTITC

SEQ ID NO: 64 - protein, 24 aa, Artificial Sequence
  Description of Artificial Sequence: Synthetic peptide
QDIQMTQSPSSLSASVGDRVTITC

SEQ ID NO: 65 - protein, 24 aa, Artificial Sequence
  Description of Artificial Sequence: Synthetic peptide
QDIQMTQSPSSLSASVGDRVTITC

SEQ ID NO: 66 - protein, 24 aa, Artificial Sequence
  Description of Artificial Sequence: Synthetic peptide
QDIQMTQSPSSLSASVGDRVTITC

SEQ ID NO: 67 - protein, 24 aa, Artificial Sequence
  Description of Artificial Sequence: Synthetic peptide
QDIQMTQSPSSLSASVGDRVTITC

SEQ ID NO: 68 - protein, 24 aa, Artificial Sequence
  Description of Artificial Sequence: Synthetic peptide
QDIQMTQSPSSLSASVGDRVTITC

SEQ ID NO: 69 - protein, 24 aa, Artificial Sequence
  Description of Artificial Sequence: Synthetic peptide
QDIQMTQSPSSLSASVGDRVTITC

SEQ ID NO: 70 - protein, 24 aa, Artificial Sequence
  Description of Artificial Sequence: Synthetic peptide
QDIQMTQSPSSLSASVGDRVTITC

SEQ ID NO: 71 - protein, 24 aa, Artificial Sequence
  Description of Artificial Sequence: Synthetic peptide
QDIQMTQSPSSLSASVGDRVTITC

SEQ ID NO: 72 - protein, 24 aa, Artificial Sequence
  Description of Artificial Sequence: Synthetic peptide
QDIQMTQSPSSLSASVGDRVTITC

SEQ ID NO: 73 - protein, 24 aa, Artificial Sequence
  Description of Artificial Sequence: Synthetic peptide
QDIQMTQSPSSLSASVGDRVTITC

SEQ ID NO: 74 - protein, 24 aa, Artificial Sequence
  Description of Artificial Sequence: Synthetic peptide
QDIQMTQSPSSLSASVGDRVTITC

SEQ ID NO: 75 - protein, 24 aa, Artificial Sequence
  Description of Artificial Sequence: Synthetic peptide
QDIQMTQSPSSLSASVGDRVTITC

SEQ ID NO: 76 - protein, 24 aa, Artificial Sequence
  Description of Artificial Sequence: Synthetic peptide
QDIQMTQSPSSLSASVGDRVTITC

SEQ ID NO: 77 - protein, 24 aa, Artificial Sequence
  Description of Artificial Sequence: Synthetic peptide
QDIQMTQSPSSLSASVGDRVTITC

SEQ ID NO: 78 - protein, 24 aa, Artificial Sequence
  Description of Artificial Sequence: Synthetic peptide
QDIQMTQSPSSLSASVGDRVTITC

SEQ ID NO: 79 - protein, 24 aa, Artificial Sequence
  Description of Artificial Sequence: Synthetic peptide
QDIQMTQSPSSLSASVGDRVTITC

SEQ ID NO: 80 - protein, 24 aa, Artificial Sequence
  Description of Artificial Sequence: Synthetic peptide
QDIQMTQSPSSLSASVGDRVTITC

SEQ ID NO: 81 - protein, 24 aa, Artificial Sequence
  Description of Artificial Sequence: Synthetic peptide
QDIQMTQSPSSLSASVGDRVTITC

SEQ ID NO: 82 - protein, 24 aa, Artificial Sequence
  Description of Artificial Sequence: Synthetic peptide
QDIQMTQSPGTLSLSPGERATMSC

SEQ ID NO: 83 - protein, 24 aa, Artificial Sequence
  Description of Artificial Sequence: Synthetic peptide
QDIQMTQSPSSLSASVGDRVTITC

SEQ ID NO: 84 - protein, 11 aa, Artificial Sequence
  Description of Artificial Sequence: Synthetic peptide
RANQSIYTYLN

SEQ ID NO: 85 - protein, 11 aa, Artificial Sequence
  Description of Artificial Sequence: Synthetic peptide
RANQSIYTYLN

SEQ ID NO: 86 - protein, 11 aa, Artificial Sequence
  Description of Artificial Sequence: Synthetic peptide
RANQSIYTYLN

SEQ ID NO: 87 - protein, 11 aa, Artificial Sequence
  Description of Artificial Sequence: Synthetic peptide
RANQSIYTYLN

SEQ ID NO: 88 - protein, 11 aa, Artificial Sequence
  Description of Artificial Sequence: Synthetic peptide
RANQSIYTYLN

SEQ ID NO: 89 - protein, 11 aa, Artificial Sequence
  Description of Artificial Sequence: Synthetic peptide
RANQSIYTYLN

SEQ ID NO: 90 - protein, 11 aa, Artificial Sequence
  Description of Artificial Sequence: Synthetic peptide
RANQSIYTYLN

SEQ ID NO: 91 - protein, 11 aa, Artificial Sequence
  Description of Artificial Sequence: Synthetic peptide
RANQSIYTYLN

SEQ ID NO: 92 - protein, 11 aa, Artificial Sequence
  Description of Artificial Sequence: Synthetic peptide
RANQSIYTYLN

SEQ ID NO: 93 - protein, 11 aa, Artificial Sequence
  Description of Artificial Sequence: Synthetic peptide
RANQSIYTYLN

SEQ ID NO: 94 - protein, 11 aa, Artificial Sequence
  Description of Artificial Sequence: Synthetic peptide
RANQSIYTYLN

SEQ ID NO: 95 - protein, 11 aa, Artificial Sequence
  Description of Artificial Sequence: Synthetic peptide
RANQSIYTYLN

SEQ ID NO: 96 - protein, 11 aa, Artificial Sequence
  Description of Artificial Sequence: Synthetic peptide
RANQSIYTYLN

SEQ ID NO: 97 - protein, 11 aa, Artificial Sequence
  Description of Artificial Sequence: Synthetic peptide
RANQSIYTYLN

SEQ ID NO: 98 - protein, 11 aa, Artificial Sequence
  Description of Artificial Sequence: Synthetic peptide
RANQSIYTYLN

SEQ ID NO: 99 - protein, 11 aa, Artificial Sequence
  Description of Artificial Sequence: Synthetic peptide
RANQSIYTYLN

SEQ ID NO: 100 - protein, 11 aa, Artificial Sequence
  Description of Artificial Sequence: Synthetic peptide
RANQSIYTYLN

SEQ ID NO: 101 - protein, 11 aa, Artificial Sequence
  Description of Artificial Sequence: Synthetic peptide
RANQSIYTYLN

SEQ ID NO: 102 - protein, 11 aa, Artificial Sequence
  Description of Artificial Sequence: Synthetic peptide
RANQSIYTYLN

SEQ ID NO: 103 - protein, 11 aa, Artificial Sequence
  Description of Artificial Sequence: Synthetic peptide
RANQSIYTYLN

SEQ ID NO: 104 - protein, 11 aa, Artificial Sequence
  Description of Artificial Sequence: Synthetic peptide
RANQSIYTYLN

SEQ ID NO: 105 - protein, 11 aa, Artificial Sequence
  Description of Artificial Sequence: Synthetic peptide
RANQSIYTYLN

SEQ ID NO: 106 - protein, 11 aa, Artificial Sequence
  Description of Artificial Sequence: Synthetic peptide
RANQSIYTYLN

SEQ ID NO: 107 - protein, 11 aa, Artificial Sequence
  Description of Artificial Sequence: Synthetic peptide
RANQSIYTYLN

SEQ ID NO: 108 - protein, 11 aa, Artificial Sequence
  Description of Artificial Sequence: Synthetic peptide
RANQSIYTYLN

SEQ ID NO: 109 - protein, 11 aa, Artificial Sequence
  Description of Artificial Sequence: Synthetic peptide
RANQSIYTYLN

SEQ ID NO: 110 - protein, 11 aa, Artificial Sequence
  Description of Artificial Sequence: Synthetic peptide
RANQSIYTYLN

SEQ ID NO: 111 - protein, 11 aa, Artificial Sequence
  Description of Artificial Sequence: Synthetic peptide
RANQSIYTYLN

SEQ ID NO: 112 - protein, 11 aa, Artificial Sequence
  Description of Artificial Sequence: Synthetic peptide
RASQSISSYLN

SEQ ID NO: 113 - protein, 11 aa, Artificial Sequence
  Description of Artificial Sequence: Synthetic peptide
RANQSIYTYLN

SEQ ID NO: 114 - protein, 11 aa, Artificial Sequence
  Description of Artificial Sequence: Synthetic peptide
RANQSIYTYLN

SEQ ID NO: 115 - protein, 11 aa, Artificial Sequence
  Description of Artificial Sequence: Synthetic peptide
RANQSIYTYLN

SEQ ID NO: 116 - protein, 12 aa, Artificial Sequence
  Description of Artificial Sequence: Synthetic peptide
RASQSFTGSYLA

SEQ ID NO: 117 - protein, 11 aa, Artificial Sequence
  Description of Artificial Sequence: Synthetic peptide
RANQSIYTYLN

SEQ ID NO: 118 - protein, 15 aa, Artificial Sequence
  Description of Artificial Sequence: Synthetic peptide
WYQQKPGKAPELLIY

SEQ ID NO: 119 - protein, 15 aa, Artificial Sequence
  Description of Artificial Sequence: Synthetic peptide
WYQQKPGKAPELLIY

SEQ ID NO: 120 - protein, 15 aa, Artificial Sequence
  Description of Artificial Sequence: Synthetic peptide
WYQQKPGKAPELLIY

SEQ ID NO: 121 - protein, 15 aa, Artificial Sequence
  Description of Artificial Sequence: Synthetic peptide
WYQQKPGKAPELLIY

SEQ ID NO: 122 - protein, 15 aa, Artificial Sequence
  Description of Artificial Sequence: Synthetic peptide
WYQQKPGKAPELLIY

SEQ ID NO: 123 - protein, 15 aa, Artificial Sequence
  Description of Artificial Sequence: Synthetic peptide
WYQQKPGKAPELLIY

SEQ ID NO: 124 - protein, 15 aa, Artificial Sequence
  Description of Artificial Sequence: Synthetic peptide
WYQQKPGKAPELLIY

SEQ ID NO: 125 - protein, 15 aa, Artificial Sequence
  Description of Artificial Sequence: Synthetic peptide
WYQQKPGKAPELLIY

SEQ ID NO: 126 - protein, 15 aa, Artificial Sequence
  Description of Artificial Sequence: Synthetic peptide
WYQQKPGKAPELLIY

SEQ ID NO: 127 - protein, 15 aa, Artificial Sequence
  Description of Artificial Sequence: Synthetic peptide
WYQQKPGKAPELLIY

SEQ ID NO: 128 - protein, 15 aa, Artificial Sequence
  Description of Artificial Sequence: Synthetic peptide
WYQQKPGKAPELLIY

SEQ ID NO: 129 - protein, 15 aa, Artificial Sequence
  Description of Artificial Sequence: Synthetic peptide
WYQQKPGKAPELLIY

SEQ ID NO: 130 - protein, 15 aa, Artificial Sequence
  Description of Artificial Sequence: Synthetic peptide
WYQQKPGKAPELLIY

SEQ ID NO: 131 - protein, 15 aa, Artificial Sequence
  Description of Artificial Sequence: Synthetic peptide
WYQQKPGKAPELLIY

SEQ ID NO: 132 - protein, 15 aa, Artificial Sequence
  Description of Artificial Sequence: Synthetic peptide
WYQQKPGKAPELLIY

SEQ ID NO: 133 - protein, 15 aa, Artificial Sequence
  Description of Artificial Sequence: Synthetic peptide
WYQQKPGKAPELLIY

SEQ ID NO: 134 - protein, 15 aa, Artificial Sequence
  Description of Artificial Sequence: Synthetic peptide
WYQQKPGKAPELLIY

SEQ ID NO: 135 - protein, 15 aa, Artificial Sequence
  Description of Artificial Sequence: Synthetic peptide
WYQQKPGKAPELLIY

SEQ ID NO: 136 - protein, 15 aa, Artificial Sequence
  Description of Artificial Sequence: Synthetic peptide
WYQQKPGKAPELLIY

SEQ ID NO: 137 - protein, 15 aa, Artificial Sequence
  Description of Artificial Sequence: Synthetic peptide
WYQQKPGKAPELLIY

SEQ ID NO: 138 - protein, 15 aa, Artificial Sequence
  Description of Artificial Sequence: Synthetic peptide
WYQQKPGKAPELLIY

SEQ ID NO: 139 - protein, 15 aa, Artificial Sequence
  Description of Artificial Sequence: Synthetic peptide
WYQQKPGKAPELLIY

SEQ ID NO: 140 - protein, 15 aa, Artificial Sequence
  Description of Artificial Sequence: Synthetic peptide
WYQQKPGKAPELLIY

SEQ ID NO: 141 - protein, 15 aa, Artificial Sequence
  Description of Artificial Sequence: Synthetic peptide
WYQQKPGKAPELLIY

SEQ ID NO: 142 - protein, 15 aa, Artificial Sequence
  Description of Artificial Sequence: Synthetic peptide
WYQQKPGKAPELLIY

SEQ ID NO: 143 - protein, 15 aa, Artificial Sequence
  Description of Artificial Sequence: Synthetic peptide
WYQQKPGKAPELLIY

SEQ ID NO: 144 - protein, 15 aa, Artificial Sequence
  Description of Artificial Sequence: Synthetic peptide
WYQQKPGKAPELLIY

SEQ ID NO: 145 - protein, 15 aa, Artificial Sequence
  Description of Artificial Sequence: Synthetic peptide
WYQQKPGKAPELLIY

SEQ ID NO: 146 - protein, 15 aa, Artificial Sequence
  Description of Artificial Sequence: Synthetic peptide
WYQQKPGKAPKLLIY

SEQ ID NO: 147 - protein, 15 aa, Artificial Sequence
  Description of Artificial Sequence: Synthetic peptide
WYQQKPGKAPELLIY

SEQ ID NO: 148 - protein, 15 aa, Artificial Sequence
  Description of Artificial Sequence: Synthetic peptide
WYQQKPGKAPELLIY

SEQ ID NO: 149 - protein, 15 aa, Artificial Sequence
  Description of Artificial Sequence: Synthetic peptide
WYQQKPGKAPELLIY

SEQ ID NO: 150 - protein, 15 aa, Artificial Sequence
  Description of Artificial Sequence: Synthetic peptide
WYQQKPGLAPRLLIY

SEQ ID NO: 151 - protein, 15 aa, Artificial Sequence
  Description of Artificial Sequence: Synthetic peptide
WYQQKPGKAPELLIY

SEQ ID NO: 152 - protein, 7 aa, Artificial Sequence
  Description of Artificial Sequence: Synthetic peptide
AASSLQS

SEQ ID NO: 153 - protein, 7 aa, Artificial Sequence
  Description of Artificial Sequence: Synthetic peptide
AASSLQS

SEQ ID NO: 154 - protein, 7 aa, Artificial Sequence
  Description of Artificial Sequence: Synthetic peptide
AASSLQS

SEQ ID NO: 155 - protein, 7 aa, Artificial Sequence
  Description of Artificial Sequence: Synthetic peptide
AASSLQS

SEQ ID NO: 156 - protein, 7 aa, Artificial Sequence
  Description of Artificial Sequence: Synthetic peptide
AASSLQS

SEQ ID NO: 157 - protein, 7 aa, Artificial Sequence
  Description of Artificial Sequence: Synthetic peptide
AASSLQS

SEQ ID NO: 158 - protein, 7 aa, Artificial Sequence
  Description of Artificial Sequence: Synthetic peptide
AASSLQS

SEQ ID NO: 159 - protein, 7 aa, Artificial Sequence
  Description of Artificial Sequence: Synthetic peptide
AASSLQS

SEQ ID NO: 160 - protein, 7 aa, Artificial Sequence
  Description of Artificial Sequence: Synthetic peptide
AASSLQS

SEQ ID NO: 161 - protein, 7 aa, Artificial Sequence
  Description of Artificial Sequence: Synthetic peptide
AASSLQS

SEQ ID NO: 162 - protein, 7 aa, Artificial Sequence
  Description of Artificial Sequence: Synthetic peptide
AASSLQS

SEQ ID NO: 163 - protein, 7 aa, Artificial Sequence
  Description of Artificial Sequence: Synthetic peptide
AASSLQS

SEQ ID NO: 164 - protein, 7 aa, Artificial Sequence
  Description of Artificial Sequence: Synthetic peptide
AASSLQS

SEQ ID NO: 165 - protein, 7 aa, Artificial Sequence
  Description of Artificial Sequence: Synthetic peptide
AASSLQS

SEQ ID NO: 166 - protein, 7 aa, Artificial Sequence
  Description of Artificial Sequence: Synthetic peptide
AASSLQS

SEQ ID NO: 167 - protein, 7 aa, Artificial Sequence
  Description of Artificial Sequence: Synthetic peptide
AASSLQS

SEQ ID NO: 168 - protein, 7 aa, Artificial Sequence
  Description of Artificial Sequence: Synthetic peptide
AASSLQS

SEQ ID NO: 169 - protein, 7 aa, Artificial Sequence
  Description of Artificial Sequence: Synthetic peptide
AASSLQS

SEQ ID NO: 170 - protein, 7 aa, Artificial Sequence
  Description of Artificial Sequence: Synthetic peptide
AASSLQS

SEQ ID NO: 171 - protein, 7 aa, Artificial Sequence
  Description of Artificial Sequence: Synthetic peptide
AASSLQS

SEQ ID NO: 172 - protein, 7 aa, Artificial Sequence
  Description of Artificial Sequence: Synthetic peptide
AASSLQS

SEQ ID NO: 173 - protein, 7 aa, Artificial Sequence
  Description of Artificial Sequence: Synthetic peptide
AASSLQS

SEQ ID NO: 174 - protein, 7 aa, Artificial Sequence
  Description of Artificial Sequence: Synthetic peptide
AASSLQS

SEQ ID NO: 175 - protein, 7 aa, Artificial Sequence
  Description of Artificial Sequence: Synthetic peptide
AASSLQS

SEQ ID NO: 176 - protein, 7 aa, Artificial Sequence
  Description of Artificial Sequence: Synthetic peptide
AASSLQS

SEQ ID NO: 177 - protein, 7 aa, Artificial Sequence
  Description of Artificial Sequence: Synthetic peptide
AASSLQS

SEQ ID NO: 178 - protein, 7 aa, Artificial Sequence
  Description of Artificial Sequence: Synthetic peptide
AASSLQS

SEQ ID NO: 179 - protein, 7 aa, Artificial Sequence
  Description of Artificial Sequence: Synthetic peptide
AASSLQS

SEQ ID NO: 180 - protein, 7 aa, Artificial Sequence
  Description of Artificial Sequence: Synthetic peptide
AASSLQS

SEQ ID NO: 181 - protein, 7 aa, Artificial Sequence
  Description of Artificial Sequence: Synthetic peptide
AASSLQS

SEQ ID NO: 182 - protein, 7 aa, Artificial Sequence
  Description of Artificial Sequence: Synthetic peptide
AASSLQS

SEQ ID NO: 183 - protein, 7 aa, Artificial Sequence
  Description of Artificial Sequence: Synthetic peptide
AASSLQS

SEQ ID NO: 184 - protein, 7 aa, Artificial Sequence
  Description of Artificial Sequence: Synthetic peptide
DASSRAA

SEQ ID NO: 185 - protein, 7 aa, Artificial Sequence
  Description of Artificial Sequence: Synthetic peptide
AASSLQS

SEQ ID NO: 186 - protein, 32 aa, Artificial Sequence
  Description of Artificial Sequence: Synthetic peptide
GVPSRFSGSGSGTDFTLTISSLQPEDFATYYC

SEQ ID NO: 187 - protein, 32 aa, Artificial Sequence; identical to SEQ ID NO: 186
  Description of Artificial Sequence: Synthetic polypeptide

SEQ ID NO: 188 - protein, 32 aa, Artificial Sequence; identical to SEQ ID NO: 186
  Description of Artificial Sequence: Synthetic polypeptide

SEQ ID NO: 189 - protein, 32 aa, Artificial Sequence; identical to SEQ ID NO: 186
  Description of Artificial Sequence: Synthetic polypeptide

SEQ ID NO: 190 - protein, 32 aa, Artificial Sequence; identical to SEQ ID NO: 186
  Description of Artificial Sequence: Synthetic polypeptide

SEQ ID NO: 191 - protein, 32 aa, Artificial Sequence; identical to SEQ ID NO: 186
  Description of Artificial Sequence: Synthetic polypeptide

SEQ ID NO: 192 - protein, 32 aa, Artificial Sequence; identical to SEQ ID NO: 186
  Description of Artificial Sequence: Synthetic polypeptide

SEQ ID NO: 193 - protein, 32 aa, Artificial Sequence; identical to SEQ ID NO: 186
  Description of Artificial Sequence: Synthetic polypeptide

SEQ ID NO: 194 - protein, 32 aa, Artificial Sequence; identical to SEQ ID NO: 186
  Description of Artificial Sequence: Synthetic polypeptide

SEQ ID NO: 195 - protein, 32 aa, Artificial Sequence; identical to SEQ ID NO: 186
  Description of Artificial Sequence: Synthetic polypeptide

SEQ ID NO: 196 - protein, 32 aa, Artificial Sequence; identical to SEQ ID NO: 186
  Description of Artificial Sequence: Synthetic polypeptide

SEQ ID NO: 197 - protein, 32 aa, Artificial Sequence; identical to SEQ ID NO: 186
  Description of Artificial Sequence: Synthetic polypeptide

SEQ ID NO: 198 - protein, 32 aa, Artificial Sequence; identical to SEQ ID NO: 186
  Description of Artificial Sequence: Synthetic polypeptide

SEQ ID NO: 199 - protein, 32 aa, Artificial Sequence; identical to SEQ ID NO: 186
  Description of Artificial Sequence: Synthetic polypeptide

SEQ ID NO: 200 - protein, 32 aa, Artificial Sequence; identical to SEQ ID NO: 186
  Description of Artificial Sequence: Synthetic polypeptide

SEQ ID NO: 201 - protein, 32 aa, Artificial Sequence; identical to SEQ ID NO: 186
  Description of Artificial Sequence: Synthetic polypeptide

SEQ ID NO: 202 - protein, 32 aa, Artificial Sequence; identical to SEQ ID NO: 186
  Description of Artificial Sequence: Synthetic polypeptide

SEQ ID NO: 203 - protein, 32 aa, Artificial Sequence; identical to SEQ ID NO: 186
  Description of Artificial Sequence: Synthetic polypeptide

SEQ ID NO: 204 - protein, 32 aa, Artificial Sequence; identical to SEQ ID NO: 186
  Description of Artificial Sequence: Synthetic polypeptide

SEQ ID NO: 205 - protein, 32 aa, Artificial Sequence; identical to SEQ ID NO: 186
  Description of Artificial Sequence: Synthetic polypeptide

SEQ ID NO: 206 - protein, 32 aa, Artificial Sequence; identical to SEQ ID NO: 186
  Description of Artificial Sequence: Synthetic polypeptide

SEQ ID NO: 207 - protein, 32 aa, Artificial Sequence; identical to SEQ ID NO: 186
  Description of Artificial Sequence: Synthetic polypeptide

SEQ ID NO: 208 - protein, 32 aa, Artificial Sequence; identical to SEQ ID NO: 186
  Description of Artificial Sequence: Synthetic polypeptide

SEQ ID NO: 209 - protein, 32 aa, Artificial Sequence; identical to SEQ ID NO: 186
  Description of Artificial Sequence: Synthetic polypeptide

SEQ ID NO: 210 - protein, 32 aa, Artificial Sequence; identical to SEQ ID NO: 186
  Description of Artificial Sequence: Synthetic polypeptide

SEQ ID NO: 211 - protein, 32 aa, Artificial Sequence; identical to SEQ ID NO: 186
  Description of Artificial Sequence: Synthetic polypeptide

SEQ ID NO: 212 - protein, 32 aa, Artificial Sequence; identical to SEQ ID NO: 186
  Description of Artificial Sequence: Synthetic polypeptide

SEQ ID NO: 213 - protein, 32 aa, Artificial Sequence; identical to SEQ ID NO: 186
  Description of Artificial Sequence: Synthetic polypeptide

SEQ ID NO: 214 - protein, 32 aa, Artificial Sequence; identical to SEQ ID NO: 186
  Description of Artificial Sequence: Synthetic polypeptide

SEQ ID NO: 215 - protein, 32 aa, Artificial Sequence; identical to SEQ ID NO: 186
  Description of Artificial Sequence: Synthetic polypeptide

SEQ ID NO: 216 - protein, 32 aa, Artificial Sequence; identical to SEQ ID NO: 186
  Description of Artificial Sequence: Synthetic polypeptide

SEQ ID NO: 217 - protein, 32 aa, Artificial Sequence; identical to SEQ ID NO: 186
  Description of Artificial Sequence: Synthetic polypeptide

SEQ ID NO: 218 - protein, 32 aa, Artificial Sequence
  Description of Artificial Sequence: Synthetic polypeptide
GIPDRFSGSGSGTDFTLTISRLEPEDFAVYYC

SEQ ID NO: 219 - protein, 32 aa, Artificial Sequence; identical to SEQ ID NO: 186
  Description of Artificial Sequence: Synthetic polypeptide

SEQ ID NO: 220 - protein, 5 aa, Artificial Sequence
  Description of Artificial Sequence: Synthetic peptide
QQAGI

SEQ ID NO: 221 - protein, 5 aa, Artificial Sequence
  Description of Artificial Sequence: Synthetic peptide
QQAGI

SEQ ID NO: 222 - protein, 5 aa, Artificial Sequence
  Description of Artificial Sequence: Synthetic peptide
QQAGI

SEQ ID NO: 223 - protein, 5 aa, Artificial Sequence
  Description of Artificial Sequence: Synthetic peptide
QQAGI

SEQ ID NO: 224 - protein, 5 aa, Artificial Sequence
  Description of Artificial Sequence: Synthetic peptide
QQAGI

SEQ ID NO: 225 - protein, 5 aa, Artificial Sequence
  Description of Artificial Sequence: Synthetic peptide
QQAGI

SEQ ID NO: 226 - protein, 5 aa, Artificial Sequence
  Description of Artificial Sequence: Synthetic peptide
QQAGI

SEQ ID NO: 227 - protein, 5 aa, Artificial Sequence
  Description of Artificial Sequence: Synthetic peptide
QQAGI

SEQ ID NO: 228 - protein, 5 aa, Artificial Sequence
  Description of Artificial Sequence: Synthetic peptide
QQAGI

SEQ ID NO: 229 - protein, 5 aa, Artificial Sequence
  Description of Artificial Sequence: Synthetic peptide
QQAGI

SEQ ID NO: 230 - protein, 5 aa, Artificial Sequence
  Description of Artificial Sequence: Synthetic peptide
QQAGI

SEQ ID NO: 231 - protein, 5 aa, Artificial Sequence
  Description of Artificial Sequence: Synthetic peptide
QQAGI

SEQ ID NO: 232 - protein, 5 aa, Artificial Sequence
  Description of Artificial Sequence: Synthetic peptide
QQAGI

SEQ ID NO: 233 - protein, 5 aa, Artificial Sequence
  Description of Artificial Sequence: Synthetic peptide
QQAGI

SEQ ID NO: 234 - protein, 5 aa, Artificial Sequence
  Description of Artificial Sequence: Synthetic peptide
QQAGI

SEQ ID NO: 235 - protein, 5 aa, Artificial Sequence
  Description of Artificial Sequence: Synthetic peptide
QQAGI

SEQ ID NO: 236 - protein, 5 aa, Artificial Sequence
  Description of Artificial Sequence: Synthetic peptide
QQAGI

SEQ ID NO: 237 - protein, 5 aa, Artificial Sequence
  Description of Artificial Sequence: Synthetic peptide
QQAGI

SEQ ID NO: 238 - protein, 5 aa, Artificial Sequence
  Description of Artificial Sequence: Synthetic peptide
QQAGI

SEQ ID NO: 239 - protein, 5 aa, Artificial Sequence
  Description of Artificial Sequence: Synthetic peptide
QQAGI

SEQ ID NO: 240 - protein, 5 aa, Artificial Sequence
  Description of Artificial Sequence: Synthetic peptide
QQAGI

SEQ ID NO: 241 - protein, 5 aa, Artificial Sequence
  Description of Artificial Sequence: Synthetic peptide
QQAGI

SEQ ID NO: 242 - protein, 5 aa, Artificial Sequence
  Description of Artificial Sequence: Synthetic peptide
QQAGI

SEQ ID NO: 243 - protein, 5 aa, Artificial Sequence
  Description of Artificial Sequence: Synthetic peptide
QQAGI

SEQ ID NO: 244 - protein, 5 aa, Artificial Sequence
  Description of Artificial Sequence: Synthetic peptide
QQAGI

SEQ ID NO: 245 - protein, 5 aa, Artificial Sequence
  Description of Artificial Sequence: Synthetic peptide
QQAGI

SEQ ID NO: 246 - protein, 5 aa, Artificial Sequence
  Description of Artificial Sequence: Synthetic peptide
QQAGI

SEQ ID NO: 247 - protein, 5 aa, Artificial Sequence
  Description of Artificial Sequence: Synthetic peptide
QQAGI

SEQ ID NO: 248 - protein, 9 aa, Artificial Sequence
  Description of Artificial Sequence: Synthetic peptide
QQSYSTPRT

SEQ ID NO: 249 - protein, 5 aa, Artificial Sequence
  Description of Artificial Sequence: Synthetic peptide
QQAGI

SEQ ID NO: 250 - protein, 5 aa, Artificial Sequence
  Description of Artificial Sequence: Synthetic peptide
QQAGI

SEQ ID NO: 251 - protein, 5 aa, Artificial Sequence
  Description of Artificial Sequence: Synthetic peptide
QQAGI

SEQ ID NO: 252 - protein, 10 aa, Artificial Sequence
  Description of Artificial Sequence: Synthetic peptide
QQYGTSPPWA

SEQ ID NO: 253 - protein, 5 aa, Artificial Sequence
  Description of Artificial Sequence: Synthetic peptide
QQAGI

SEQ ID NO: 254 - protein, 10 aa, Artificial Sequence
  Description of Artificial Sequence: Synthetic peptide
FGQGTKLEIK

SEQ ID NO: 255 - protein, 10 aa, Artificial Sequence
  Description of Artificial Sequence: Synthetic peptide
FGQGTKLEIK

SEQ ID NO: 256 - protein, 10 aa, Artificial Sequence
  Description of Artificial Sequence: Synthetic peptide
FGQGTKLEIK

SEQ ID NO: 257 - protein, 10 aa, Artificial Sequence
  Description of Artificial Sequence: Synthetic peptide
FGQGTKLEIK

SEQ ID NO: 258 - protein, 10 aa, Artificial Sequence
  Description of Artificial Sequence: Synthetic peptide
FGQGTKLEIK

SEQ ID NO: 259 - protein, 10 aa, Artificial Sequence
  Description of Artificial Sequence: Synthetic peptide
FGQGTKLEIK

SEQ ID NO: 260 - protein, 10 aa, Artificial Sequence
  Description of Artificial Sequence: Synthetic peptide
FGQGTKLEIK

SEQ ID NO: 261 - protein, 10 aa, Artificial Sequence
  Description of Artificial Sequence: Synthetic peptide
FGQGTKLEIK

SEQ ID NO: 262 - protein, 10 aa, Artificial Sequence
  Description of Artificial Sequence: Synthetic peptide
FGQGTKLEIK

SEQ ID NO: 263 - protein, 10 aa, Artificial Sequence
  Description of Artificial Sequence: Synthetic peptide
FGQGTKLEIK

SEQ ID NO: 264 - protein, 10 aa, Artificial Sequence
  Description of Artificial Sequence: Synthetic peptide
FGQGTKLEIK

SEQ ID NO: 265 - protein, 10 aa, Artificial Sequence
  Description of Artificial Sequence: Synthetic peptide
FGQGTKLEIK

SEQ ID NO: 266 - protein, 10 aa, Artificial Sequence
  Description of Artificial Sequence: Synthetic peptide
FGQGTKLEIK

SEQ ID NO: 267 - protein, 10 aa, Artificial Sequence
  Description of Artificial Sequence: Synthetic peptide
FGQGTKLEIK

SEQ ID NO: 268 - protein, 10 aa, Artificial Sequence
  Description of Artificial Sequence: Synthetic peptide
FGQGTKLEIK

SEQ ID NO: 269 - protein, 10 aa, Artificial Sequence
  Description of Artificial Sequence: Synthetic peptide
FGQGTKLEIK

SEQ ID NO: 270 - protein, 10 aa, Artificial Sequence
  Description of Artificial Sequence: Synthetic peptide
FGQGTKLEIK

SEQ ID NO: 271 - protein, 10 aa, Artificial Sequence
  Description of Artificial Sequence: Synthetic peptide
FGQGTKLEIK

SEQ ID NO: 272 - protein, 10 aa, Artificial Sequence
  Description of Artificial Sequence: Synthetic peptide
FGQGTKLEIK

SEQ ID NO: 273 - protein, 10 aa, Artificial Sequence
  Description of Artificial Sequence: Synthetic peptide
FGQGTKLEIK

SEQ ID NO: 274 - protein, 10 aa, Artificial Sequence
  Description of Artificial Sequence: Synthetic peptide
FGQGTKLEIK

SEQ ID NO: 275 - protein, 10 aa, Artificial Sequence
  Description of Artificial Sequence: Synthetic peptide
FGQGTKLEIK

SEQ ID NO: 276 - protein, 10 aa, Artificial Sequence
  Description of Artificial Sequence: Synthetic peptide
FGQGTKLEIK

SEQ ID NO: 277 - protein, 10 aa, Artificial Sequence
  Description of Artificial Sequence: Synthetic peptide
FGQGTKLEIK

SEQ ID NO: 278 - protein, 10 aa, Artificial Sequence
  Description of Artificial Sequence: Synthetic peptide
FGQGTKLEIK

SEQ ID NO: 279 - protein, 10 aa, Artificial Sequence
  Description of Artificial Sequence: Synthetic peptide
FGQGTKLEIK

SEQ ID NO: 280 - protein, 10 aa, Artificial Sequence
  Description of Artificial Sequence: Synthetic peptide
FGQGTKLEIK

SEQ ID NO: 281 - protein, 10 aa, Artificial Sequence
  Description of Artificial Sequence: Synthetic peptide
FGQGTKLEIK

SEQ ID NO: 282 - protein, 10 aa, Artificial Sequence
  Description of Artificial Sequence: Synthetic peptide
FGQGTKVEIK

SEQ ID NO: 283 - protein, 10 aa, Artificial Sequence
  Description of Artificial Sequence: Synthetic peptide
FGQGTKLEIK

SEQ ID NO: 284 - protein, 10 aa, Artificial Sequence
  Description of Artificial Sequence: Synthetic peptide
FGQGTKLEIK

SEQ ID NO: 285 - protein, 10 aa, Artificial Sequence
  Description of Artificial Sequence: Synthetic peptide
FGQGTKLEIK

SEQ ID NO: 286 - protein, 10 aa, Artificial Sequence
  Description of Artificial Sequence: Synthetic peptide
FGQGTKVEIK

SEQ ID NO: 287 - protein, 10 aa, Artificial Sequence
  Description of Artificial Sequence: Synthetic peptide
FGQGTKLEIK

SEQ ID NO: 288 - protein, 7 aa, Artificial Sequence
  Description of Artificial Sequence: Synthetic peptide
RTVAAPS

SEQ ID NO: 289 - protein, 7 aa, Artificial Sequence
  Description of Artificial Sequence: Synthetic peptide
RTVAAPS

SEQ ID NO: 290 - protein, 7 aa, Artificial Sequence
  Description of Artificial Sequence: Synthetic peptide
RTVAAPS

SEQ ID NO: 291 - protein, 7 aa, Artificial Sequence
  Description of Artificial Sequence: Synthetic peptide
RTVAAPS

SEQ ID NO: 292 - protein, 7 aa, Artificial Sequence
  Description of Artificial Sequence: Synthetic peptide
RTVAAPS

SEQ ID NO: 293 - protein, 7 aa, Artificial Sequence
  Description of Artificial Sequence: Synthetic peptide
RTVAAPS

SEQ ID NO: 294 - protein, 7 aa, Artificial Sequence
  Description of Artificial Sequence: Synthetic peptide
RTVAAPS

SEQ ID NO: 295 - protein, 7 aa, Artificial Sequence
  Description of Artificial Sequence: Synthetic peptide
RTVAAPS

SEQ ID NO: 296 - protein, 7 aa, Artificial Sequence
  Description of Artificial Sequence: Synthetic peptide
RTVAAPS

SEQ ID NO: 297 - protein, 7 aa, Artificial Sequence
  Description of Artificial Sequence: Synthetic peptide
RTVAAPS

SEQ ID NO: 298 - protein, 7 aa, Artificial Sequence
  Description of Artificial Sequence: Synthetic peptide
RTVAAPS

SEQ ID NO: 299 - protein, 7 aa, Artificial Sequence
  Description of Artificial Sequence: Synthetic peptide
RTVAAPS

SEQ ID NO: 300 - protein, 7 aa, Artificial Sequence
  Description of Artificial Sequence: Synthetic peptide
RTVAAPS

SEQ ID NO: 301 - protein, 7 aa, Artificial Sequence
  Description of Artificial Sequence: Synthetic peptide
RTVAAPS

SEQ ID NO: 302 - protein, 7 aa, Artificial Sequence
  Description of Artificial Sequence: Synthetic peptide
RTVAAPS

SEQ ID NO: 303 - protein, 7 aa, Artificial Sequence
  Description of Artificial Sequence: Synthetic peptide
RTVAAPS

SEQ ID NO: 304 - protein, 7 aa, Artificial Sequence
  Description of Artificial Sequence: Synthetic peptide
RTVAAPS

SEQ ID NO: 305 - protein, 7 aa, Artificial Sequence
  Description of Artificial Sequence: Synthetic peptide
RTVAAPS

SEQ ID NO: 306 - protein, 7 aa, Artificial Sequence
  Description of Artificial Sequence: Synthetic peptide
RTVAAPS

SEQ ID NO: 307 - protein, 7 aa, Artificial Sequence
  Description of Artificial Sequence: Synthetic peptide
RTVAAPS

SEQ ID NO: 308 - protein, 7 aa, Artificial Sequence
  Description of Artificial Sequence: Synthetic peptide
RTVAAPS

SEQ ID NO: 309 - protein, 7 aa, Artificial Sequence
  Description of Artificial Sequence: Synthetic peptide
RTVAAPS

SEQ ID NO: 310 - protein, 7 aa, Artificial Sequence
  Description of Artificial Sequence: Synthetic peptide
RTVAAPS

SEQ ID NO: 311 - protein, 7 aa, Artificial Sequence
  Description of Artificial Sequence: Synthetic peptide
RTVAAPS

SEQ ID NO: 312 - protein, 7 aa, Artificial Sequence
  Description of Artificial Sequence: Synthetic peptide
RTVAAPS

SEQ ID NO: 313 - protein, 7 aa, Artificial Sequence
  Description of Artificial Sequence: Synthetic peptide
RTVAAPS

SEQ ID NO: 314 - protein, 7 aa, Artificial Sequence
  Description of Artificial Sequence: Synthetic peptide
RTVAAPS

SEQ ID NO: 315 - protein, 7 aa, Artificial Sequence
  Description of Artificial Sequence: Synthetic peptide
RTVAAPS

SEQ ID NO: 316 - protein, 7 aa, Artificial Sequence
  Description of Artificial Sequence: Synthetic peptide
RTVAAPS

SEQ ID NO: 317 - protein, 7 aa, Artificial Sequence
  Description of Artificial Sequence: Synthetic peptide
RTVAAPS

SEQ ID NO: 318 - protein, 7 aa, Artificial Sequence
  Description of Artificial Sequence: Synthetic peptide
RTVAAPS

SEQ ID NO: 319 - protein, 7 aa, Artificial Sequence
  Description of Artificial Sequence: Synthetic peptide
RTVAAPS

SEQ ID NO: 320 - protein, 7 aa, Artificial Sequence
  Description of Artificial Sequence: Synthetic peptide
RTVAAPS

SEQ ID NO: 321 - protein, 7 aa, Artificial Sequence
  Description of Artificial Sequence: Synthetic peptide
RTVAAPS

SEQ ID NO: 322 - protein, 30 aa, Artificial Sequence
  Description of Artificial Sequence: Synthetic polypeptide
EVQLLESGGGLVQPGGSLRLSCAASGFTFS

SEQ ID NO: 323 - protein, 30 aa, Artificial Sequence; identical to SEQ ID NO: 322
  Description of Artificial Sequence: Synthetic polypeptide

SEQ ID NO: 324 - protein, 30 aa, Artificial Sequence; identical to SEQ ID NO: 322
  Description of Artificial Sequence: Synthetic polypeptide

SEQ ID NO: 325 - protein, 30 aa, Artificial Sequence; identical to SEQ ID NO: 322
  Description of Artificial Sequence: Synthetic polypeptide

SEQ ID NO: 326 - protein, 30 aa, Artificial Sequence; identical to SEQ ID NO: 322
  Description of Artificial Sequence: Synthetic polypeptide

SEQ ID NO: 327 - protein, 30 aa, Artificial Sequence; identical to SEQ ID NO: 322
  Description of Artificial Sequence: Synthetic polypeptide

SEQ ID NO: 328 - protein, 30 aa, Artificial Sequence; identical to SEQ ID NO: 322
  Description of Artificial Sequence: Synthetic polypeptide

SEQ ID NO: 329 - protein, 30 aa, Artificial Sequence; identical to SEQ ID NO: 322
  Description of Artificial Sequence: Synthetic polypeptide

SEQ ID NO: 330 - protein, 30 aa, Artificial Sequence; identical to SEQ ID NO: 322
  Description of Artificial Sequence: Synthetic polypeptide

SEQ ID NO: 331 - protein, 30 aa, Artificial Sequence; identical to SEQ ID NO: 322
  Description of Artificial Sequence: Synthetic polypeptide

SEQ ID NO: 332 - protein, 30 aa, Artificial Sequence; identical to SEQ ID NO: 322
  Description of Artificial Sequence: Synthetic polypeptide

SEQ ID NO: 333 - protein, 30 aa, Artificial Sequence; identical to SEQ ID NO: 322
  Description of Artificial Sequence: Synthetic polypeptide

SEQ ID NO: 334 - protein, 30 aa, Artificial Sequence; identical to SEQ ID NO: 322
  Description of Artificial Sequence: Synthetic polypeptide

SEQ ID NO: 335 - protein, 30 aa, Artificial Sequence; identical to SEQ ID NO: 322
  Description of Artificial Sequence: Synthetic polypeptide

SEQ ID NO: 336 - protein, 30 aa, Artificial Sequence; identical to SEQ ID NO: 322
  Description of Artificial Sequence: Synthetic polypeptide

SEQ ID NO: 337 - protein, 30 aa, Artificial Sequence; identical to SEQ ID NO: 322
  Description of Artificial Sequence: Synthetic polypeptide

SEQ ID NO: 338 - protein, 30 aa, Artificial Sequence; identical to SEQ ID NO: 322
  Description of Artificial Sequence: Synthetic polypeptide

SEQ ID NO: 339 - protein, 30 aa, Artificial Sequence; identical to SEQ ID NO: 322
  Description of Artificial Sequence: Synthetic polypeptide

SEQ ID NO: 340 - protein, 30 aa, Artificial Sequence; identical to SEQ ID NO: 322
  Description of Artificial Sequence: Synthetic polypeptide

SEQ ID NO: 341 - protein, 30 aa, Artificial Sequence; identical to SEQ ID NO: 322
  Description of Artificial Sequence: Synthetic polypeptide

SEQ ID NO: 342 - protein, 30 aa, Artificial Sequence; identical to SEQ ID NO: 322
  Description of Artificial Sequence: Synthetic polypeptide

SEQ ID NO: 343 - protein, 30 aa, Artificial Sequence; identical to SEQ ID NO: 322
  Description of Artificial Sequence: Synthetic polypeptide

SEQ ID NO: 344 - protein, 30 aa, Artificial Sequence; identical to SEQ ID NO: 322
  Description of Artificial Sequence: Synthetic polypeptide

SEQ ID NO: 345 - protein, 30 aa, Artificial Sequence; identical to SEQ ID NO: 322
  Description of Artificial Sequence: Synthetic polypeptide

SEQ ID NO: 346 - protein, 30 aa, Artificial Sequence; identical to SEQ ID NO: 322
  Description of Artificial Sequence: Synthetic polypeptide

SEQ ID NO: 347 - protein, 30 aa, Artificial Sequence; identical to SEQ ID NO: 322
  Description of Artificial Sequence: Synthetic polypeptide

SEQ ID NO: 348 - protein, 30 aa, Artificial Sequence; identical to SEQ ID NO: 322
  Description of Artificial Sequence: Synthetic polypeptide

SEQ ID NO: 349 - protein, 30 aa, Artificial Sequence; identical to SEQ ID NO: 322
  Description of Artificial Sequence: Synthetic polypeptide

SEQ ID NO: 350 - protein, 30 aa, Artificial Sequence; identical to SEQ ID NO: 322
  Description of Artificial Sequence: Synthetic polypeptide

SEQ ID NO: 351 - protein, 30 aa, Artificial Sequence; identical to SEQ ID NO: 322
  Description of Artificial Sequence: Synthetic polypeptide

SEQ ID NO: 352 - protein, 30 aa, Artificial Sequence; identical to SEQ ID NO: 322
  Description of Artificial Sequence: Synthetic polypeptide

SEQ ID NO: 353 - protein, 30 aa, Artificial Sequence; identical to SEQ ID NO: 322
  Description of Artificial Sequence: Synthetic polypeptide

SEQ ID NO: 354 - protein, 30 aa, Artificial Sequence; identical to SEQ ID NO: 322
  Description of Artificial Sequence: Synthetic polypeptide

SEQ ID NO: 355 - protein, 30 aa, Artificial Sequence; identical to SEQ ID NO: 322
  Description of Artificial Sequence: Synthetic peptide

SEQ ID NO: 356 - protein, 5 aa, Artificial Sequence
  Description of Artificial Sequence: Synthetic peptide
QYWMG

SEQ ID NO: 357 - protein, 5 aa, Artificial Sequence
  Description of Artificial Sequence: Synthetic peptide
DYGMA

SEQ ID NO: 358 - protein, 5 aa, Artificial Sequence
  Description of Artificial Sequence: Synthetic peptide
WYWMG

SEQ ID NO: 359 - protein, 5 aa, Artificial Sequence
  Description of Artificial Sequence: Synthetic peptide
PYWMH

SEQ ID NO: 360 - protein, 5 aa, Artificial Sequence
  Description of Artificial Sequence: Synthetic peptide
PYWMS

SEQ ID NO: 361 - protein, 5 aa, Artificial Sequence
  Description of Artificial Sequence: Synthetic peptide
WYWMV

SEQ ID NO: 362 - protein, 5 aa, Artificial Sequence
  Description of Artificial Sequence: Synthetic peptide
WYNMH

SEQ ID NO: 363 - protein, 5 aa, Artificial Sequence
  Description of Artificial Sequence: Synthetic peptide
WYGMG

SEQ ID NO: 364 - protein, 5 aa, Artificial Sequence
  Description of Artificial Sequence: Synthetic peptide
YYGMG

SEQ ID NO: 365 - protein, 5 aa, Artificial Sequence
  Description of Artificial Sequence: Synthetic peptide
QYWMS

SEQ ID NO: 366 - protein, 5 aa, Artificial Sequence
  Description of Artificial Sequence: Synthetic peptide
WYWMH

SEQ ID NO: 367 - protein, 5 aa, Artificial Sequence
  Description of Artificial Sequence: Synthetic peptide
RYNMH

SEQ ID NO: 368 - protein, 5 aa, Artificial Sequence
  Description of Artificial Sequence: Synthetic peptide
VYGMS

SEQ ID NO: 369 - protein, 5 aa, Artificial Sequence
  Description of Artificial Sequence: Synthetic peptide
EYWMA

SEQ ID NO: 370 - protein, 5 aa, Artificial Sequence
  Description of Artificial Sequence: Synthetic peptide
WYNMS

SEQ ID NO: 371 - protein, 5 aa, Artificial Sequence
  Description of Artificial Sequence: Synthetic peptide
EYWMG

SEQ ID NO: 372 - protein, 5 aa, Artificial Sequence
  Description of Artificial Sequence: Synthetic peptide
YYNMS

SEQ ID NO: 373 - protein, 5 aa, Artificial Sequence
  Description of Artificial Sequence: Synthetic peptide
YYNMH

SEQ ID NO: 374 - protein, 5 aa, Artificial Sequence
  Description of Artificial Sequence: Synthetic peptide
LYHMH

SEQ ID NO: 375 - protein, 5 aa, Artificial Sequence
  Description of Artificial Sequence: Synthetic peptide
EYNMH

SEQ ID NO: 376 - protein, 5 aa, Artificial Sequence
  Description of Artificial Sequence: Synthetic peptide
EYWMT

SEQ ID NO: 377 - protein, 5 aa, Artificial Sequence
  Description of Artificial Sequence: Synthetic peptide
HYWMH

SEQ ID NO: 378 - protein, 5 aa, Artificial Sequence
  Description of Artificial Sequence: Synthetic peptide
QYNMH

SEQ ID NO: 379 - protein, 5 aa, Artificial Sequence
  Description of Artificial Sequence: Synthetic peptide
PYWMH

SEQ ID NO: 380 - protein, 5 aa, Artificial Sequence
  Description of Artificial Sequence: Synthetic peptide
PYWMH

SEQ ID NO: 381 - protein, 5 aa, Artificial Sequence
  Description of Artificial Sequence: Synthetic peptide
AYGMS

SEQ ID NO: 382 - protein, 5 aa, Artificial Sequence
  Description of Artificial Sequence: Synthetic peptide
WYYMG

SEQ ID NO: 383 - protein, 5 aa, Artificial Sequence
  Description of Artificial Sequence: Synthetic peptide
FYWMD

SEQ ID NO: 384 - protein, 5 aa, Artificial Sequence
  Description of Artificial Sequence: Synthetic peptide
DYNMH

SEQ ID NO: 385 - protein, 5 aa, Artificial Sequence
  Description of Artificial Sequence: Synthetic peptide
WYWMV

SEQ ID NO: 386 - protein, 5 aa, Artificial Sequence
  Description of Artificial Sequence: Synthetic peptide
RYMMH

SEQ ID NO: 387 - protein, 5 aa, Artificial Sequence
  Description of Artificial Sequence: Synthetic peptide
HYWMQ

SEQ ID NO: 388 - protein, 5 aa, Artificial Sequence
  Description of Artificial Sequence: Synthetic peptide
DYNMH

SEQ ID NO: 389 - protein, 5 aa, Artificial Sequence
  Description of Artificial Sequence: Synthetic peptide
DYWMA

SEQ ID NO: 390 - protein, 14 aa, Artificial Sequence
  Description of Artificial Sequence: Synthetic peptide
WVRQAPGKGLEWVS

SEQ ID NO: 391 - protein, 14 aa, Artificial Sequence
  Description of Artificial Sequence: Synthetic peptide
WVRQAPGKGLEWVS

SEQ ID NO: 392 - protein, 14 aa, Artificial Sequence
  Description of Artificial Sequence: Synthetic peptide
WVRQAPGKGLEWVS

SEQ ID NO: 393 - protein, 14 aa, Artificial Sequence
  Description of Artificial Sequence: Synthetic peptide
WVRQAPGKGLEWVS

SEQ ID NO: 394 - protein, 14 aa, Artificial Sequence
  Description of Artificial Sequence: Synthetic peptide
WVRQAPGKGLEWVS

SEQ ID NO: 395 - protein, 14 aa, Artificial Sequence
  Description of Artificial Sequence: Synthetic peptide
WVRQAPGKGLEWVS

SEQ ID NO: 396 - protein, 14 aa, Artificial Sequence
  Description of Artificial Sequence: Synthetic peptide
WVRQAPGKGLEWVS

SEQ ID NO: 397 - protein, 14 aa, Artificial Sequence
  Description of Artificial Sequence: Synthetic peptide
WVRQAPGKGLEWVS

SEQ ID NO: 398 - protein, 14 aa, Artificial Sequence
  Description of Artificial Sequence: Synthetic peptide
WVRQAPGKGLEWVS

SEQ ID NO: 399 - protein, 14 aa, Artificial Sequence
  Description of Artificial Sequence: Synthetic peptide
WVRQAPGKGLEWVS

SEQ ID NO: 400 - protein, 14 aa, Artificial Sequence
  Description of Artificial Sequence: Synthetic peptide
WVRQAPGKGLEWVS

SEQ ID NO: 401 - protein, 14 aa, Artificial Sequence
  Description of Artificial Sequence: Synthetic peptide
WVRQAPGKGLEWVS

SEQ ID NO: 402 - protein, 14 aa, Artificial Sequence
  Description of Artificial Sequence: Synthetic peptide
WVRQAPGKGLEWVS

SEQ ID NO: 403 - protein, 14 aa, Artificial Sequence
  Description of Artificial Sequence: Synthetic peptide
WVRQAPGKGLEWVS

SEQ ID NO: 404 - protein, 14 aa, Artificial Sequence
  Description of Artificial Sequence: Synthetic peptide
WVRQAPGKGLEWVS

SEQ ID NO: 405 - protein, 14 aa, Artificial Sequence
  Description of Artificial Sequence: Synthetic peptide
WVRQAPGKGLEWVS

SEQ ID NO: 406 - protein, 14 aa, Artificial Sequence
  Description of Artificial Sequence: Synthetic peptide
WVRQAPGKGLEWVS

SEQ ID NO: 407 - protein, 14 aa, Artificial Sequence
  Description of Artificial Sequence: Synthetic peptide
WVRQAPGKGLEWVS

SEQ ID NO: 408 - protein, 14 aa, Artificial Sequence
  Description of Artificial Sequence: Synthetic peptide
WVRQAPGKGLEWVS

SEQ ID NO: 409 - protein, 14 aa, Artificial Sequence
  Description of Artificial Sequence: Synthetic peptide
WVRQAPGKGLEWVS

SEQ ID NO: 410 - protein, 14 aa, Artificial Sequence
  Description of Artificial Sequence: Synthetic peptide
WVRQAPGKGLEWVS

SEQ ID NO: 411 - protein, 14 aa, Artificial Sequence
  Description of Artificial Sequence: Synthetic peptide
WVRQAPGKGLEWVS

SEQ ID NO: 412 - protein, 14 aa, Artificial Sequence
  Description of Artificial Sequence: Synthetic peptide
WVRQAPGKGLEWVS

SEQ ID NO: 413 - protein, 14 aa, Artificial Sequence
  Description of Artificial Sequence: Synthetic peptide
WVRQAPGKGLEWVS

SEQ ID NO: 414 - protein, 14 aa, Artificial Sequence
  Description of Artificial Sequence: Synthetic peptide
WVRQAPGKGLEWVS

SEQ ID NO: 415 - protein, 14 aa, Artificial Sequence
  Description of Artificial Sequence: Synthetic peptide
WVRQAPGKGLEWVS

SEQ ID NO: 416 - protein, 14 aa, Artificial Sequence
  Description of Artificial Sequence: Synthetic peptide
WVRQAPGKGLEWVS

SEQ ID NO: 417 - protein, 14 aa, Artificial Sequence
  Description of Artificial Sequence: Synthetic peptide
WVRQAPGKGLEWVS

SEQ ID NO: 418 - protein, 14 aa, Artificial Sequence
  Description of Artificial Sequence: Synthetic peptide
WVRQAPGKGLEWVS

SEQ ID NO: 419 - protein, 14 aa, Artificial Sequence
  Description of Artificial Sequence: Synthetic peptide
WVRQAPGKGLEWVS

SEQ ID NO: 420 - protein, 14 aa, Artificial Sequence
  Description of Artificial Sequence: Synthetic peptide
WVRQAPGKGLEWVS

SEQ ID NO: 421 - protein, 14 aa, Artificial Sequence
  Description of Artificial Sequence: Synthetic peptide
WVRQAPGKGLEWVS

SEQ ID NO: 422 - protein, 14 aa, Artificial Sequence
  Description of Artificial Sequence: Synthetic peptide
WVRQAPGKGLEWVS

SEQ ID NO: 423 - protein, 14 aa, Artificial Sequence
  Description of Artificial Sequence: Synthetic peptide
WVRQAPGKGLEWVS

SEQ ID NO: 424 - protein, 17 aa, Artificial Sequence
  Description of Artificial Sequence: Synthetic peptide
SISPSGGMTMYADSVKG

SEQ ID NO: 425 - protein, 17 aa, Artificial Sequence
  Description of Artificial Sequence: Synthetic peptide
SISPSGGWTLYADSVKG

SEQ ID NO: 426 - protein, 17 aa, Artificial Sequence
  Description of Artificial Sequence: Synthetic peptide
SISPSGGYTFYADSVKG

SEQ ID NO: 427 - protein, 17 aa, Artificial Sequence
  Description of Artificial Sequence: Synthetic peptide
GIGPSGGLTFYADSVKG

SEQ ID NO: 428 - protein, 17 aa, Artificial Sequence
  Description of Artificial Sequence: Synthetic peptide
GISPSGGITFYADSVKG

SEQ ID NO: 429 - protein, 17 aa, Artificial Sequence
  Description of Artificial Sequence: Synthetic peptide
SIGPSGGDTYYADSVKG

SEQ ID NO: 430 - protein, 17 aa, Artificial Sequence
  Description of Artificial Sequence: Synthetic peptide
GISPSGGNTMYADSVKG

SEQ ID NO: 431 - protein, 17 aa, Artificial Sequence
  Description of Artificial Sequence: Synthetic peptide
VIVSSGGFTQYADSVKG

SEQ ID NO: 432 - protein, 17 aa, Artificial Sequence
  Description of Artificial Sequence: Synthetic peptide
VISSSGGFTFYADSVKG

SEQ ID NO: 433 - protein, 17 aa, Artificial Sequence
  Description of Artificial Sequence: Synthetic peptide
SISPSGGETFYADSVKG

SEQ ID NO: 434 - protein, 17 aa, Artificial Sequence
  Description of Artificial Sequence: Synthetic peptide
GIVSSGGTTIYADSVKG

SEQ ID NO: 435 - protein, 17 aa, Artificial Sequence
  Description of Artificial Sequence: Synthetic peptide
GIVPSGGTTHYADSVKG

SEQ ID NO: 436 - protein, 17 aa, Artificial Sequence
  Description of Artificial Sequence: Synthetic peptide
RIVPSGGRTGYADSVKG

SEQ ID NO: 437 - protein, 17 aa, Artificial Sequence
  Description of Artificial Sequence: Synthetic peptide
SISPSGGHTFYADSVKG

SEQ ID NO: 438 - protein, 17 aa, Artificial Sequence
  Description of Artificial Sequence: Synthetic peptide
RISPSGGDTGYADSVKG

SEQ ID NO: 439 - protein, 17 aa, Artificial Sequence
  Description of Artificial Sequence: Synthetic peptide
SIYPSGGNTIYADSVKG

SEQ ID NO: 440 - protein, 17 aa, Artificial Sequence
  Description of Artificial Sequence: Synthetic peptide
GISPSGGPTGYADSVKG

SEQ ID NO: 441 - protein, 17 aa, Artificial Sequence
  Description of Artificial Sequence: Synthetic peptide
GIGPSGGGTLYADSVKG

SEQ ID NO: 442 - protein, 17 aa, Artificial Sequence
  Description of Artificial Sequence: Synthetic peptide
GIGPSGGWTIYADSVKG

SEQ ID NO: 443 - protein, 17 aa, Artificial Sequence
  Description of Artificial Sequence: Synthetic peptide
GISPSGGMTHYADSVKG

SEQ ID NO: 444 - protein, 17 aa, Artificial Sequence
  Description of Artificial Sequence: Synthetic peptide
GISPSGGMTFYADSVKG

SEQ ID NO: 445 - protein, 17 aa, Artificial Sequence
  Description of Artificial Sequence: Synthetic peptide
GISPSGGMTMYADSVKG

SEQ ID NO: 446 - protein, 17 aa, Artificial Sequence
  Description of Artificial Sequence: Synthetic peptide
GIGPSGGITIYADSVKG

SEQ ID NO: 447 - protein, 17 aa, Artificial Sequence
  Description of Artificial Sequence: Synthetic peptide
GISSSGGDTLYADSVKG

SEQ ID NO: 448 - protein, 17 aa, Artificial Sequence
  Description of Artificial Sequence: Synthetic peptide
GIGPSGGPTFYADSIKG

SEQ ID NO: 449 - protein, 17 aa, Artificial Sequence
  Description of Artificial Sequence: Synthetic peptide
RISPSGGITGYADSVKG

SEQ ID NO: 450 - protein, 17 aa, Artificial Sequence
  Description of Artificial Sequence: Synthetic peptide
SISPSGGWTRYADSVKG

SEQ ID NO: 451 - protein, 17 aa, Artificial Sequence
  Description of Artificial Sequence: Synthetic peptide
SISPSGGTTIYADSVKG

SEQ ID NO: 452 - protein, 17 aa, Artificial Sequence
  Description of Artificial Sequence: Synthetic peptide
YIGPSGGYTHYADSVKG

SEQ ID NO: 453 - protein, 17 aa, Artificial Sequence
  Description of Artificial Sequence: Synthetic peptide
SIVPSGGFTIYADSVKG

SEQ ID NO: 454 - protein, 17 aa, Artificial Sequence
  Description of Artificial Sequence: Synthetic peptide
YISSSGGTTIYADSVKG

SEQ ID NO: 455 - protein, 17 aa, Artificial Sequence
  Description of Artificial Sequence: Synthetic peptide
GIVPSGGLTMYADSVKG

SEQ ID NO: 456 - protein, 17 aa, Artificial Sequence
  Description of Artificial Sequence: Synthetic peptide
YIGPSGGYTHYADSVKG

SEQ ID NO: 457 - protein, 17 aa, Artificial Sequence
  Description of Artificial Sequence: Synthetic peptide
SIGPSGGFTVYADSVKG

SEQ ID NO: 458 - protein, 32 aa, Artificial Sequence
  Description of Artificial Sequence: Synthetic polypeptide
RFTISRDNSKNTLYLQMNSLRAEDTAVYYCAK

SEQ ID NO: 459 - protein, 32 aa, Artificial Sequence; identical to SEQ ID NO: 458
  Description of Artificial Sequence: Synthetic polypeptide

SEQ ID NO: 460 - protein, 32 aa, Artificial Sequence; identical to SEQ ID NO: 458
  Description of Artificial Sequence: Synthetic polypeptide

SEQ ID NO: 461 - protein, 32 aa, Artificial Sequence; identical to SEQ ID NO: 458
  Description of Artificial Sequence: Synthetic polypeptide

SEQ ID NO: 462 - protein, 32 aa, Artificial Sequence; identical to SEQ ID NO: 458
  Description of Artificial Sequence: Synthetic polypeptide

SEQ ID NO: 463 - protein, 32 aa, Artificial Sequence; identical to SEQ ID NO: 458
  Description of Artificial Sequence: Synthetic polypeptide

SEQ ID NO: 464 - protein, 32 aa, Artificial Sequence; identical to SEQ ID NO: 458
  Description of Artificial Sequence: Synthetic polypeptide

SEQ ID NO: 465 - protein, 32 aa, Artificial Sequence; identical to SEQ ID NO: 458
  Description of Artificial Sequence: Synthetic polypeptide

SEQ ID NO: 466 - protein, 32 aa, Artificial Sequence; identical to SEQ ID NO: 458
  Description of Artificial Sequence: Synthetic polypeptide

SEQ ID NO: 467 - protein, 32 aa, Artificial Sequence; identical to SEQ ID NO: 458
  Description of Artificial Sequence: Synthetic polypeptide

SEQ ID NO: 468 - protein, 32 aa, Artificial Sequence; identical to SEQ ID NO: 458
  Description of Artificial Sequence: Synthetic polypeptide

SEQ ID NO: 469 - protein, 32 aa, Artificial Sequence; identical to SEQ ID NO: 458
  Description of Artificial Sequence: Synthetic polypeptide

SEQ ID NO: 470 - protein, 32 aa, Artificial Sequence; identical to SEQ ID NO: 458
  Description of Artificial Sequence: Synthetic polypeptide

SEQ ID NO: 471 - protein, 32 aa, Artificial Sequence; identical to SEQ ID NO: 458
  Description of Artificial Sequence: Synthetic polypeptide

SEQ ID NO: 472 - protein, 32 aa, Artificial Sequence; identical to SEQ ID NO: 458
  Description of Artificial Sequence: Synthetic polypeptide

SEQ ID NO: 473 - protein, 32 aa, Artificial Sequence; identical to SEQ ID NO: 458
  Description of Artificial Sequence: Synthetic polypeptide

SEQ ID NO: 474 - protein, 32 aa, Artificial Sequence; identical to SEQ ID NO: 458
  Description of Artificial Sequence: Synthetic polypeptide

SEQ ID NO: 475 - protein, 32 aa, Artificial Sequence; identical to SEQ ID NO: 458
  Description of Artificial Sequence: Synthetic polypeptide

SEQ ID NO: 476 - protein, 32 aa, Artificial Sequence; identical to SEQ ID NO: 458
  Description of Artificial Sequence: Synthetic polypeptide

SEQ ID NO: 477 - protein, 32 aa, Artificial Sequence; identical to SEQ ID NO: 458
  Description of Artificial Sequence: Synthetic polypeptide

SEQ ID NO: 478 - protein, 32 aa, Artificial Sequence; identical to SEQ ID NO: 458
  Description of Artificial Sequence: Synthetic polypeptide

SEQ ID NO: 479 - protein, 32 aa, Artificial Sequence; identical to SEQ ID NO: 458
  Description of Artificial Sequence: Synthetic polypeptide

SEQ ID NO: 480 - protein, 32 aa, Artificial Sequence; identical to SEQ ID NO: 458
  Description of Artificial Sequence: Synthetic polypeptide

SEQ ID NO: 481 - protein, 32 aa, Artificial Sequence; identical to SEQ ID NO: 458
  Description of Artificial Sequence: Synthetic polypeptide

SEQ ID NO: 482 - protein, 32 aa, Artificial Sequence; identical to SEQ ID NO: 458
  Description of Artificial Sequence: Synthetic polypeptide

SEQ ID NO: 483 - protein, 32 aa, Artificial Sequence; identical to SEQ ID NO: 458
  Description of Artificial Sequence: Synthetic polypeptide

SEQ ID NO: 484 - protein, 32 aa, Artificial Sequence; identical to SEQ ID NO: 458
  Description of Artificial Sequence: Synthetic polypeptide

SEQ ID NO: 485 - protein, 32 aa, Artificial Sequence; identical to SEQ ID NO: 458
  Description of Artificial Sequence: Synthetic polypeptide

SEQ ID NO: 486 - protein, 32 aa, Artificial Sequence; identical to SEQ ID NO: 458
  Description of Artificial Sequence: Synthetic polypeptide

SEQ ID NO: 487 - protein, 32 aa, Artificial Sequence; identical to SEQ ID NO: 458
  Description of Artificial Sequence: Synthetic polypeptide

SEQ ID NO: 488 - protein, 32 aa, Artificial Sequence; identical to SEQ ID NO: 458
  Description of Artificial Sequence: Synthetic polypeptide

SEQ ID NO: 489 - protein, 32 aa, Artificial Sequence; identical to SEQ ID NO: 458
  Description of Artificial Sequence: Synthetic polypeptide

SEQ ID NO: 490 - protein, 32 aa, Artificial Sequence; identical to SEQ ID NO: 458
  Description of Artificial Sequence: Synthetic polypeptide

SEQ ID NO: 491 - protein, 32 aa, Artificial Sequence; identical to SEQ ID NO: 458
  Description of Artificial Sequence: Synthetic polypeptide

SEQ ID NO: 492 - protein, 13 aa, Artificial Sequence
  Description of Artificial Sequence: Synthetic peptide
DIRGAYSSGLFDY

SEQ ID NO: 493 - protein, 13 aa, Artificial Sequence
  Description of Artificial Sequence: Synthetic peptide
DIRGAYSSGLFDY

SEQ ID NO: 494 - protein, 13 aa, Artificial Sequence
  Description of Artificial Sequence: Synthetic peptide
DIRGAYSSGLFDY

SEQ ID NO: 495 - protein, 13 aa, Artificial Sequence
  Description of Artificial Sequence: Synthetic peptide
DIRGAYSSGLFDY

SEQ ID NO: 496 - protein, 13 aa, Artificial Sequence
  Description of Artificial Sequence: Synthetic peptide
DIRGAYSSGLFDY

SEQ ID NO: 497 - protein, 13 aa, Artificial Sequence
  Description of Artificial Sequence: Synthetic peptide
DIRGAYSSGLFDY

SEQ ID NO: 498 - protein, 13 aa, Artificial Sequence
  Description of Artificial Sequence: Synthetic peptide
DIRGAYSSGLFDY

SEQ ID NO: 499 - protein, 13 aa, Artificial Sequence
  Description of Artificial Sequence: Synthetic peptide
DIRGAYSSGLFDY

SEQ ID NO: 500 - protein, 13 aa, Artificial Sequence
  Description of Artificial Sequence: Synthetic peptide
DIRGAYSSGLFDY

SEQ ID NO: 501 - protein, 13 aa, Artificial Sequence
  Description of Artificial Sequence: Synthetic peptide
DIRGAYSSGLFDY

SEQ ID NO: 502 - protein, 13 aa, Artificial Sequence
  Description of Artificial Sequence: Synthetic peptide
DIRGAYSSGLFDY

SEQ ID NO: 503 - protein, 13 aa, Artificial Sequence
  Description of Artificial Sequence: Synthetic peptide
DIRGAYSSGLFDY

SEQ ID NO: 504 - protein, 13 aa, Artificial Sequence
  Description of Artificial Sequence: Synthetic peptide
DIRGAYSSGLFDY

SEQ ID NO: 505 - protein, 13 aa, Artificial Sequence
  Description of Artificial Sequence: Synthetic peptide
DIRGAYSSGLFDY

SEQ ID NO: 506 - protein, 13 aa, Artificial Sequence
  Description of Artificial Sequence: Synthetic peptide
DIRGAYSSGLFDY

SEQ ID NO: 507 - protein, 13 aa, Artificial Sequence
  Description of Artificial Sequence: Synthetic peptide
DIRGAYSSGLFDY

SEQ ID NO: 508 - protein, 13 aa, Artificial Sequence
  Description of Artificial Sequence: Synthetic peptide
DIRGAYSSGLFDY

SEQ ID NO: 509 - protein, 13 aa, Artificial Sequence
  Description of Artificial Sequence: Synthetic peptide
DIRGAYSSGLFDY

SEQ ID NO: 510 - protein, 13 aa, Artificial Sequence
  Description of Artificial Sequence: Synthetic peptide
DIRGAYSSGLFDY

SEQ ID NO: 511 - protein, 13 aa, Artificial Sequence
  Description of Artificial Sequence: Synthetic peptide
DIRGAYSSGLFDY

SEQ ID NO: 512 - protein, 13 aa, Artificial Sequence
  Description of Artificial Sequence: Synthetic peptide
DIRGAYSSGLFDY

SEQ ID NO: 513 - protein, 13 aa, Artificial Sequence
  Description of Artificial Sequence: Synthetic peptide
DIRGAYSSGLFDY

SEQ ID NO: 514 - protein, 13 aa, Artificial Sequence
  Description of Artificial Sequence: Synthetic peptide
DIRGAYSSGLFDY

SEQ ID NO: 515 - protein, 13 aa, Artificial Sequence
  Description of Artificial Sequence: Synthetic peptide
DIRGAYSSGLFDY

SEQ ID NO: 516 - protein, 13 aa, Artificial Sequence
  Description of Artificial Sequence: Synthetic peptide
DIRGAYSSGLFDY

SEQ ID NO: 517 - protein, 13 aa, Artificial Sequence
  Description of Artificial Sequence: Synthetic peptide
DIRGAYSSGLFDY

SEQ ID NO: 518 - protein, 13 aa, Artificial Sequence
  Description of Artificial Sequence: Synthetic peptide
DIRGAYSSGLFDY

SEQ ID NO: 519 - protein, 13 aa, Artificial Sequence
  Description of Artificial Sequence: Synthetic peptide
DIRGAYSSGLFDY

SEQ ID NO: 520 - protein, 13 aa, Artificial Sequence
  Description of Artificial Sequence: Synthetic peptide
DIRGAYSSGLFDY

SEQ ID NO: 521 - protein, 13 aa, Artificial Sequence
  Description of Artificial Sequence: Synthetic peptide
DIRGAYSSGLFDY

SEQ ID NO: 522 - protein, 13 aa, Artificial Sequence
  Description of Artificial Sequence: Synthetic peptide
DIRGAYSSGLFDY

SEQ ID NO: 523 - protein, 13 aa, Artificial Sequence
  Description of Artificial Sequence: Synthetic peptide
DIRGAYSSGLFDY

SEQ ID NO: 524 - protein, 13 aa, Artificial Sequence
  Description of Artificial Sequence: Synthetic peptide
DIRGAYSSGLFDY

SEQ ID NO: 525 - protein, 13 aa, Artificial Sequence
  Description of Artificial Sequence: Synthetic peptide
DIRGAYSSGLFDY

SEQ ID NO: 526 - protein, 11 aa, Artificial Sequence
  Description of Artificial Sequence: Synthetic peptide
WGRGTLVTVSS

SEQ ID NO: 527 - protein, 11 aa, Artificial Sequence
  Description of Artificial Sequence: Synthetic peptide
WGRGTLVTVSS

SEQ ID NO: 528 - protein, 11 aa, Artificial Sequence
  Description of Artificial Sequence: Synthetic peptide
WGRGTLVTVSS

SEQ ID NO: 529 - protein, 11 aa, Artificial Sequence
  Description of Artificial Sequence: Synthetic peptide
WGRGTLVTVSS

SEQ ID NO: 530 - protein, 11 aa, Artificial Sequence
  Description of Artificial Sequence: Synthetic peptide
WGRGTLVTVSS

SEQ ID NO: 531 - protein, 11 aa, Artificial Sequence
  Description of Artificial Sequence: Synthetic peptide
WGRGTLVTVSS

SEQ ID NO: 532 - protein, 11 aa, Artificial Sequence
  Description of Artificial Sequence: Synthetic peptide
WGRGTLVTVSS

SEQ ID NO: 533 - protein, 11 aa, Artificial Sequence
  Description of Artificial Sequence: Synthetic peptide
WGRGTLVTVSS

SEQ ID NO: 534 - protein, 11 aa, Artificial Sequence
  Description of Artificial Sequence: Synthetic peptide
WGRGTLVTVSS

SEQ ID NO: 535 - protein, 11 aa, Artificial Sequence
  Description of Artificial Sequence: Synthetic peptide
WGRGTLVTVSS

SEQ ID NO: 536 - protein, 11 aa, Artificial Sequence
  Description of Artificial Sequence: Synthetic peptide
WGRGTLVTVSS

SEQ ID NO: 537 - protein, 11 aa, Artificial Sequence
  Description of Artificial Sequence: Synthetic peptide
WGRGTLVTVSS

SEQ ID NO: 538 - protein, 11 aa, Artificial Sequence
  Description of Artificial Sequence: Synthetic peptide
WGRGTLVTVSS

SEQ ID NO: 539 - protein, 11 aa, Artificial Sequence
  Description of Artificial Sequence: Synthetic peptide
WGRGTLVTVSS

SEQ ID NO: 540 - protein, 11 aa, Artificial Sequence
  Description of Artificial Sequence: Synthetic peptide
WGRGTLVTVSS

SEQ ID NO: 541 - protein, 11 aa, Artificial Sequence
  Description of Artificial Sequence: Synthetic peptide
WGRGTLVTVSS

SEQ ID NO: 542 - protein, 11 aa, Artificial Sequence
  Description of Artificial Sequence: Synthetic peptide
WGRGTLVTVSS

SEQ ID NO: 543 - protein, 11 aa, Artificial Sequence
  Description of Artificial Sequence: Synthetic peptide
WGRGTLVTVSS

SEQ ID NO: 544 - protein, 11 aa, Artificial Sequence
  Description of Artificial Sequence: Synthetic peptide
WGRGTLVTVSS

SEQ ID NO: 545 - protein, 11 aa, Artificial Sequence
  Description of Artificial Sequence: Synthetic peptide
WGRGTLVTVSS

SEQ ID NO: 546 - protein, 11 aa, Artificial Sequence
  Description of Artificial Sequence: Synthetic peptide
WGRGTLVTVSS

SEQ ID NO: 547 - protein, 11 aa, Artificial Sequence
  Description of Artificial Sequence: Synthetic peptide
WGRGTLVTVSS

SEQ ID NO: 548 - protein, 11 aa, Artificial Sequence
  Description of Artificial Sequence: Synthetic peptide
WGRGTLVTVSS

SEQ ID NO: 549 - protein, 11 aa, Artificial Sequence
  Description of Artificial Sequence: Synthetic peptide
WGRGTLVTVSS

SEQ ID NO: 550 - protein, 11 aa, Artificial Sequence
  Description of Artificial Sequence: Synthetic peptide
WGRGTLVTVSS

SEQ ID NO: 551 - protein, 11 aa, Artificial Sequence
  Description of Artificial Sequence: Synthetic peptide
WGRGTLVTVSS

SEQ ID NO: 552 - protein, 11 aa, Artificial Sequence
  Description of Artificial Sequence: Synthetic peptide
WGRGTLVTVSS

SEQ ID NO: 553 - protein, 11 aa, Artificial Sequence
  Description of Artificial Sequence: Synthetic peptide
WGRGTLVTVSS

SEQ ID NO: 554 - protein, 11 aa, Artificial Sequence
  Description of Artificial Sequence: Synthetic peptide
WGRGTLVTVSS

SEQ ID NO: 555 - protein, 11 aa, Artificial Sequence
  Description of Artificial Sequence: Synthetic peptide
WGRGTLVTVSS

SEQ ID NO: 556 - protein, 11 aa, Artificial Sequence
  Description of Artificial Sequence: Synthetic peptide
WGRGTLVTVSS

SEQ ID NO: 557 - protein, 11 aa, Artificial Sequence
  Description of Artificial Sequence: Synthetic peptide
WGRGTLVTVSS

SEQ ID NO: 558 - protein, 11 aa, Artificial Sequence
  Description of Artificial Sequence: Synthetic peptide
WGRGTLVTVSS

SEQ ID NO: 559 - protein, 11 aa, Artificial Sequence
  Description of Artificial Sequence: Synthetic peptide
WGRGTLVTVSS

SEQ ID NO: 560 - protein, 24 aa, Artificial Sequence
  Description of Artificial Sequence: Synthetic peptide
QDIQMTQSPSSLSASVGDRVTITC

SEQ ID NO: 561 - protein, 24 aa, Artificial Sequence
  Description of Artificial Sequence: Synthetic peptide
QDIQMTQSPSSLSASVGDRVTITC

SEQ ID NO: 562 - protein, 24 aa, Artificial Sequence
  Description of Artificial Sequence: Synthetic peptide
QDIQMTQSPSSLSASVGDRVTITC

SEQ ID NO: 563 - protein, 11 aa, Artificial Sequence
  Description of Artificial Sequence: Synthetic peptide
RANQSIYTYLN

SEQ ID NO: 564 - protein, 11 aa, Artificial Sequence
  Description of Artificial Sequence: Synthetic peptide
RANQSIYTYLN

SEQ ID NO: 565 - protein, 11 aa, Artificial Sequence
  Description of Artificial Sequence: Synthetic peptide
RANQSIYTYLN

SEQ ID NO: 566 - protein, 15 aa, Artificial Sequence
  Description of Artificial Sequence: Synthetic peptide
WYQQKPGKAPELLIY

SEQ ID NO: 567 - protein, 15 aa, Artificial Sequence
  Description of Artificial Sequence: Synthetic peptide
WYQQKPGKAPELLIY

SEQ ID NO: 568 - protein, 15 aa, Artificial Sequence
  Description of Artificial Sequence: Synthetic peptide
WYQQKPGKAPELLIY

SEQ ID NO: 569 - protein, 7 aa, Artificial Sequence
  Description of Artificial Sequence: Synthetic peptide
AASSLQS

SEQ ID NO: 570 - protein, 7 aa, Artificial Sequence
  Description of Artificial Sequence: Synthetic peptide
AASSLQS

SEQ ID NO: 571 - protein, 7 aa, Artificial Sequence
  Description of Artificial Sequence: Synthetic peptide
AASSLQS

SEQ ID NO: 572 - protein, 32 aa, Artificial Sequence; identical to SEQ ID NO: 186
  Description of Artificial Sequence: Synthetic polypeptide

SEQ ID NO: 573 - protein, 32 aa, Artificial Sequence; identical to SEQ ID NO: 186
  Description of Artificial Sequence: Synthetic polypeptide

SEQ ID NO: 574 - protein, 32 aa, Artificial Sequence; identical to SEQ ID NO: 186
  Description of Artificial Sequence: Synthetic polypeptide

SEQ ID NO: 575 - protein, 5 aa, Artificial Sequence
  Description of Artificial Sequence: Synthetic peptide
QQAGI

SEQ ID NO: 576 - protein, 5 aa, Artificial Sequence
  Description of Artificial Sequence: Synthetic peptide
QQAGI

SEQ ID NO: 577 - protein, 5 aa, Artificial Sequence
  Description of Artificial Sequence: Synthetic peptide
QQAGI

SEQ ID NO: 578 - protein, 10 aa, Artificial Sequence
  Description of Artificial Sequence: Synthetic peptide
FGQGTKLEIK

SEQ ID NO: 579 - protein, 10 aa, Artificial Sequence
  Description of Artificial Sequence: Synthetic peptide
FGQGTKLEIK

SEQ ID NO: 580 - protein, 10 aa, Artificial Sequence
  Description of Artificial Sequence: Synthetic peptide
FGQGTKLEIK

SEQ ID NO: 581 - protein, 7 aa, Artificial Sequence
  Description of Artificial Sequence: Synthetic peptide
RTVAAPS

SEQ ID NO: 582 - protein, 7 aa, Artificial Sequence
  Description of Artificial Sequence: Synthetic peptide
RTVAAPS

SEQ ID NO: 583 - protein, 7 aa, Artificial Sequence
  Description of Artificial Sequence: Synthetic peptide
RTVAAPS

SEQ ID NO: 584 - protein, 21 aa, Artificial Sequence
  Description of Artificial Sequence: Synthetic peptide
MKKLLFAIPLVVPFVAQPAMA

SEQ ID NO: 585 - protein, 21 aa, Artificial Sequence
  Description of Artificial Sequence: Synthetic peptide
MKKLLFAIPLVVPFVAQPAMA

SEQ ID NO: 586 - protein, 21 aa, Artificial Sequence
  Description of Artificial Sequence: Synthetic peptide
MKKLLFAIPLVVPFVAQPAMA

SEQ ID NO: 587 - protein, 30 aa, Artificial Sequence; identical to SEQ ID NO: 322
  Description of Artificial Sequence: Synthetic polypeptide

SEQ ID NO: 588 - protein, 30 aa, Artificial Sequence; identical to SEQ ID NO: 322
  Description of Artificial Sequence: Synthetic polypeptide

SEQ ID NO: 589 - protein, 30 aa, Artificial Sequence; identical to SEQ ID NO: 322
  Description of Artificial Sequence: Synthetic polypeptide

SEQ ID NO: 590 - protein, 5 aa, Artificial Sequence
  Description of Artificial Sequence: Synthetic peptide
WYNMA

SEQ ID NO: 591 - protein, 5 aa, Artificial Sequence
  Description of Artificial Sequence: Synthetic peptide
WYNMG

SEQ ID NO: 592 - protein, 5 aa, Artificial Sequence
  Description of Artificial Sequence: Synthetic peptide
WYNMV

SEQ ID NO: 593 - protein, 14 aa, Artificial Sequence
  Description of Artificial Sequence: Synthetic peptide
WVRQAPGKGLEWVS

SEQ ID NO: 594 - protein, 14 aa, Artificial Sequence
  Description of Artificial Sequence: Synthetic peptide
WVRQAPGKGLEWVS

SEQ ID NO: 595 - protein, 14 aa, Artificial Sequence
  Description of Artificial Sequence: Synthetic peptide
WVRQAPGKGLEWVS

SEQ ID NO: 596 - protein, 17 aa, Artificial Sequence
  Description of Artificial Sequence: Synthetic peptide
RISPSGGDTGYADSVKG

SEQ ID NO: 597 - protein, 17 aa, Artificial Sequence
  Description of Artificial Sequence: Synthetic peptide
RISPSGGDTGYADSVKG

SEQ ID NO: 598 - protein, 17 aa, Artificial Sequence
  Description of Artificial Sequence: Synthetic peptide
RISPSGGDTGYADSVKG

SEQ ID NO: 599 - protein, 32 aa, Artificial Sequence; identical to SEQ ID NO: 458
  Description of Artificial Sequence: Synthetic polypeptide

SEQ ID NO: 600 - protein, 32 aa, Artificial Sequence; identical to SEQ ID NO: 458
  Description of Artificial Sequence: Synthetic polypeptide

SEQ ID NO: 601 - protein, 32 aa, Artificial Sequence; identical to SEQ ID NO: 458
  Description of Artificial Sequence: Synthetic polypeptide

SEQ ID NO: 602 - protein, 13 aa, Artificial Sequence
  Description of Artificial Sequence: Synthetic peptide
DIRGAYSSGLFDY

SEQ ID NO: 603 - protein, 13 aa, Artificial Sequence
  Description of Artificial Sequence: Synthetic peptide
DIRGAYSSGLFDY

SEQ ID NO: 604 - protein, 13 aa, Artificial Sequence
  Description of Artificial Sequence: Synthetic peptide
DIRGAYSSGLFDY

SEQ ID NO: 605 - protein, 11 aa, Artificial Sequence
  Description of Artificial Sequence: Synthetic peptide
WGRGTLVTVSS

SEQ ID NO: 606 - protein, 11 aa, Artificial Sequence
  Description of Artificial Sequence: Synthetic peptide
WGRGTLVTVSS

SEQ ID NO: 607 - protein, 11 aa, Artificial Sequence
  Description of Artificial Sequence: Synthetic peptide
WGRGTLVTVSS

SEQ ID NO: 608 - protein, 104 aa, Artificial Sequence
  Description of Artificial Sequence: Synthetic polypeptide
QDIQMTQSPSSLSASVGDRVTITCRANQSIYTYLNWYQQKPGKAPELLIYAASSLQSGVPSRFSGSGSGTDFTLTISSLQPEDFATYYCQQAGIFGQGTKLEIK

SEQ ID NO: 609 - protein, 104 aa, Artificial Sequence; identical to SEQ ID NO: 608
  Description of Artificial Sequence: Synthetic polypeptide

SEQ ID NO: 610 - protein, 104 aa, Artificial Sequence; identical to SEQ ID NO: 608
  Description of Artificial Sequence: Synthetic polypeptide

SEQ ID NO: 611 - protein, 104 aa, Artificial Sequence; identical to SEQ ID NO: 608
  Description of Artificial Sequence: Synthetic polypeptide

SEQ ID NO: 612 - protein, 104 aa, Artificial Sequence; identical to SEQ ID NO: 608
  Description of Artificial Sequence: Synthetic polypeptide

SEQ ID NO: 613 - protein, 104 aa, Artificial Sequence; identical to SEQ ID NO: 608
  Description of Artificial Sequence: Synthetic polypeptide

SEQ ID NO: 614 - protein, 104 aa, Artificial Sequence; identical to SEQ ID NO: 608
  Description of Artificial Sequence: Synthetic polypeptide

SEQ ID NO: 615 - protein, 104 aa, Artificial Sequence; identical to SEQ ID NO: 608
  Description of Artificial Sequence: Synthetic polypeptide

SEQ ID NO: 616 - protein, 104 aa, Artificial Sequence; identical to SEQ ID NO: 608
  Description of Artificial Sequence: Synthetic polypeptide

SEQ ID NO: 617 - protein, 104 aa, Artificial Sequence; identical to SEQ ID NO: 608
  Description of Artificial Sequence: Synthetic polypeptide

SEQ ID NO: 618 - protein, 104 aa, Artificial Sequence; identical to SEQ ID NO: 608
  Description of Artificial Sequence: Synthetic polypeptide

SEQ ID NO: 619 - protein, 104 aa, Artificial Sequence; identical to SEQ ID NO: 608
  Description of Artificial Sequence: Synthetic polypeptide

SEQ ID NO: 620 - protein, 104 aa, Artificial Sequence; identical to SEQ ID NO: 608
  Description of Artificial Sequence: Synthetic polypeptide

SEQ ID NO: 621 - protein, 104 aa, Artificial Sequence; identical to SEQ ID NO: 608
  Description of Artificial Sequence: Synthetic polypeptide

SEQ ID NO: 622 - protein, 104 aa, Artificial Sequence; identical to SEQ ID NO: 608
  Description of Artificial Sequence: Synthetic polypeptide

SEQ ID NO: 623 - protein, 104 aa, Artificial Sequence; identical to SEQ ID NO: 608
  Description of Artificial Sequence: Synthetic polypeptide

SEQ ID NO: 624 - protein, 104 aa, Artificial Sequence; identical to SEQ ID NO: 608
  Description of Artificial Sequence: Synthetic polypeptide

SEQ ID NO: 625 - protein, 104 aa, Artificial Sequence; identical to SEQ ID NO: 608
  Description of Artificial Sequence: Synthetic polypeptide

SEQ ID NO: 626 - protein, 104 aa, Artificial Sequence; identical to SEQ ID NO: 608
  Description of Artificial Sequence: Synthetic polypeptide

SEQ ID NO: 627 - protein, 104 aa, Artificial Sequence; identical to SEQ ID NO: 608
  Description of Artificial Sequence: Synthetic polypeptide

SEQ ID NO: 628 - protein, 104 aa, Artificial Sequence; identical to SEQ ID NO: 608
  Description of Artificial Sequence: Synthetic polypeptide

SEQ ID NO: 629 - protein, 104 aa, Artificial Sequence; identical to SEQ ID NO: 608
  Description of Artificial Sequence: Synthetic polypeptide

SEQ ID NO: 630 - protein, 104 aa, Artificial Sequence; identical to SEQ ID NO: 608
  Description of Artificial Sequence: Synthetic polypeptide

SEQ ID NO: 631 - protein, 104 aa, Artificial Sequence; identical to SEQ ID NO: 608
  Description of Artificial Sequence: Synthetic polypeptide

SEQ ID NO: 632 - protein, 104 aa, Artificial Sequence; identical to SEQ ID NO: 608
  Description of Artificial Sequence: Synthetic polypeptide

SEQ ID NO: 633 - protein, 104 aa, Artificial Sequence; identical to SEQ ID NO: 608
  Description of Artificial Sequence: Synthetic polypeptide

SEQ ID NO: 634 - protein, 104 aa, Artificial Sequence; identical to SEQ ID NO: 608
  Description of Artificial Sequence: Synthetic polypeptide

SEQ ID NO: 635 - protein, 104 aa, Artificial Sequence; identical to SEQ ID NO: 608
  Description of Artificial Sequence: Synthetic polypeptide

SEQ ID NO: 636 - protein, 108 aa, Artificial Sequence
  Description of Artificial Sequence: Synthetic polypeptide
QDIQMTQSPSSLSASVGDRVTITCRASQSISSYLNWYQQKPGKAPKLLIYAASSLQSGVPSRFSGSGSGTDFTLTISSLQPEDFATYYCQQSYSTPRTFGQGTKVEIK

SEQ ID NO: 637 - protein, 104 aa, Artificial Sequence; identical to SEQ ID NO: 608
  Description of Artificial Sequence: Synthetic polypeptide

SEQ ID NO: 638 - protein, 104 aa, Artificial Sequence; identical to SEQ ID NO: 608
  Description of Artificial Sequence: Synthetic polypeptide

SEQ ID NO: 639 - protein, 104 aa, Artificial Sequence; identical to SEQ ID NO: 608
  Description of Artificial Sequence: Synthetic polypeptide

SEQ ID NO: 640 - protein, 110 aa, Artificial Sequence
  Description of Artificial Sequence: Synthetic polypeptide
QDIQMTQSPGTLSLSPGERATMSCRASQSFTGSYLAWYQQKPGLAPRLLIYDASSRAAGIPDRFSGSGSGTDFTLTISRLEPEDFAVYYCQQYGTSPPWAFGQGTKVEIK

SEQ ID NO: 641 - protein, 104 aa, Artificial Sequence; identical to SEQ ID NO: 608
  Description of Artificial Sequence: Synthetic polypeptide

SEQ ID NO: 642 - protein, 122 aa, Artificial Sequence
  Description of Artificial Sequence: Synthetic polypeptide
EVQLLESGGGLVQPGGSLRLSCAASGFTFSQYWMGWVRQAPGKGLEWVSSISPSGGMTMYADSVKGRFTISRDNSKNTLYLQMNSLRAEDTAVYYCAKDIRGAYSSGLFDYWGRGTLVTVSS

SEQ ID NO: 643 - protein, 122 aa, Artificial Sequence
  Description of Artificial Sequence: Synthetic polypeptide
EVQLLESGGGLVQPGGSLRLSCAASGFTFSDYGMAWVRQAPGKGLEWVSSISPSGGWTLYADSVKGRFTISRDNSKNTLYLQMNSLRAEDTAVYYCAKDIRGAYSSGLFDYWGRGTLVTVSS

SEQ ID NO: 644 - protein, 122 aa, Artificial Sequence
  Description of Artificial Sequence: Synthetic polypeptide
EVQLLESGGGLVQPGGSLRLSCAASGFTFSWYWMGWVRQAPGKGLEWVSSISPSGGYTFYADSVKGRFTISRDNSKNTLYLQMNSLRAEDTAVYYCAKDIRGAYSSGLFDYWGRGTLVTVSS

SEQ ID NO: 645 - protein, 122 aa, Artificial Sequence
  Description of Artificial Sequence: Synthetic polypeptide
EVQLLESGGGLVQPGGSLRLSCAASGFTFSPYWMHWVRQAPGKGLEWVSGIGPSGGLTFYADSVKGRFTISRDNSKNTLYLQMNSLRAEDTAVYYCAKDIRGAYSSGLFDYWGRGTLVTVSS

SEQ ID NO: 646 - protein, 122 aa, Artificial Sequence
  Description of Artificial Sequence: Synthetic polypeptide
EVQLLESGGGLVQPGGSLRLSCAASGFTFSPYWMSWVRQAPGKGLEWVSGISPSGGITFYADSVKGRFTISRDNSKNTLYLQMNSLRAEDTAVYYCAKDIRGAYSSGLFDYWGRGTLVTVSS

SEQ ID NO: 647 - protein, 122 aa, Artificial Sequence
  Description of Artificial Sequence: Synthetic polypeptide
EVQLLESGGGLVQPGGSLRLSCAASGFTFSWYWMVWVRQAPGKGLEWVSSIGPSGGDTYYADSVKGRFTISRDNSKNTLYLQMNSLRAEDTAVYYCAKDIRGAYSSGLFDYWGRGTLVTVSS

SEQ ID NO: 648 - protein, 122 aa, Artificial Sequence
  Description of Artificial Sequence: Synthetic polypeptide
EVQLLESGGGLVQPGGSLRLSCAASGFTFSWYNMHWVRQAPGKGLEWVSGISPSGGNTMYADSVKGRFTISRDNSKNTLYLQMNSLRAEDTAVYYCAKDIRGAYSSGLFDYWGRGTLVTVSS

SEQ ID NO: 649 - protein, 122 aa, Artificial Sequence
  Description of Artificial Sequence: Synthetic polypeptide
EVQLLESGGGLVQPGGSLRLSCAASGFTFSWYGMGWVRQAPGKGLEWVSVIVSSGGFTQYADSVKGRFTISRDNSKNTLYLQMNSLRAEDTAVYYCAKDIRGAYSSGLFDYWGRGTLVTVSS

SEQ ID NO: 650 - protein, 122 aa, Artificial Sequence
  Description of Artificial Sequence: Synthetic polypeptide
EVQLLESGGGLVQPGGSLRLSCAASGFTFSYYGMGWVRQAPGKGLEWVSVISSSGGFTFYADSVKGRFTISRDNSKNTLYLQMNSLRAEDTAVYYCAKDIRGAYSSGLFDYWGRGTLVTVSS

SEQ ID NO: 651 - protein, 122 aa, Artificial Sequence
  Description of Artificial Sequence: Synthetic polypeptide
EVQLLESGGGLVQPGGSLRLSCAASGFTFSQYWMSWVRQAPGKGLEWVSSISPSGGETFYADSVKGRFTISRDNSKNTLYLQMNSLRAEDTAVYYCAKDIRGAYSSGLFDYWGRGTLVTVSS

SEQ ID NO: 652 - protein, 122 aa, Artificial Sequence
  Description of Artificial Sequence: Synthetic polypeptide
EVQLLESGGGLVQPGGSLRLSCAASGFTFSWYWMHWVRQAPGKGLEWVSGIVSSGGTTIYADSVKGRFTISRDNSKNTLYLQMNSLRAEDTAVYYCAKDIRGAYSSGLFDYWGRGTLVTVSS

SEQ ID NO: 653 - protein, 122 aa, Artificial Sequence
  Description of Artificial Sequence: Synthetic polypeptide
EVQLLESGGGLVQPGGSLRLSCAASGFTFSRYNMHWVRQAPGKGLEWVSGIVPSGGTTHYADSVKGRFTISRDNSKNTLYLQMNSLRAEDTAVYYCAKDIRGAYSSGLFDYWGRGTLVTVSS

SEQ ID NO: 654 - protein, 122 aa, Artificial Sequence
  Description of Artificial Sequence: Synthetic polypeptide
EVQLLESGGGLVQPGGSLRLSCAASGFTFSVYGMSWVRQAPGKGLEWVSRIVPSGGRTGYADSVKGRFTISRDNSKNTLYLQMNSLRAEDTAVYYCAKDIRGAYSSGLFDYWGRGTLVTVSS

SEQ ID NO: 655 - protein, 122 aa, Artificial Sequence
  Description of Artificial Sequence: Synthetic polypeptide
EVQLLESGGGLVQPGGSLRLSCAASGFTFSEYWMAWVRQAPGKGLEWVSSISPSGGHTFYADSVKGRFTISRDNSKNTLYLQMNSLRAEDTAVYYCAKDIRGAYSSGLFDYWGRGTLVTVSS

SEQ ID NO: 656 - protein, 122 aa, Artificial Sequence
  Description of Artificial Sequence: Synthetic polypeptide
EVQLLESGGGLVQPGGSLRLSCAASGFTFSWYNMSWVRQAPGKGLEWVSRISPSGGDTGYADSVKGRFTISRDNSKNTLYLQMNSLRAEDTAVYYCAKDIRGAYSSGLFDYWGRGTLVTVSS

SEQ ID NO: 657 - protein, 122 aa, Artificial Sequence
  Description of Artificial Sequence: Synthetic polypeptide
EVQLLESGGGLVQPGGSLRLSCAASGFTFSEYWMGWVRQAPGKGLEWVSSIYPSGGNTIYADSVKGRFTISRDNSKNTLYLQMNSLRAEDTAVYYCAKDIRGAYSSGLFDYWGRGTLVTVSS

SEQ ID NO: 658 - protein, 122 aa, Artificial Sequence
  Description of Artificial Sequence: Synthetic polypeptide
EVQLLESGGGLVQPGGSLRLSCAASGFTFSYYNMSWVRQAPGKGLEWVSGISPSGGPTGYADSVKGRFTISRDNSKNTLYLQMNSLRAEDTAVYYCAKDIRGAYSSGLFDYWGRGTLVTVSS

SEQ ID NO: 659 - protein, 122 aa, Artificial Sequence
  Description of Artificial Sequence: Synthetic polypeptide
EVQLLESGGGLVQPGGSLRLSCAASGFTFSYYNMHWVRQAPGKGLEWVSGIGPSGGGTLYADSVKGRFTISRDNSKNTLYLQMNSLRAEDTAVYYCAKDIRGAYSSGLFDYWGRGTLVTVSS

SEQ ID NO: 660 - protein, 122 aa, Artificial Sequence
  Description of Artificial Sequence: Synthetic polypeptide
EVQLLESGGGLVQPGGSLRLSCAASGFTFSLYHMHWVRQAPGKGLEWVSGIGPSGGWTIYADSVKGRFTISRDNSKNTLYLQMNSLRAEDTAVYYCAKDIRGAYSSGLFDYWGRGTLVTVSS

SEQ ID NO: 661 - protein, 122 aa, Artificial Sequence
  Description of Artificial Sequence: Synthetic polypeptide
EVQLLESGGGLVQPGGSLRLSCAASGFTFSEYNMHWVRQAPGKGLEWVSGISPSGGMTHYADSVKGRFTISRDNSKNTLYLQMNSLRAEDTAVYYCAKDIRGAYSSGLFDYWGRGTLVTVSS

SEQ ID NO: 662 - protein, 122 aa, Artificial Sequence
  Description of Artificial Sequence: Synthetic polypeptide
EVQLLESGGGLVQPGGSLRLSCAASGFTFSEYWMTWVRQAPGKGLEWVSGISPSGGMTFYADSVKGRFTISRDNSKNTLYLQMNSLRAEDTAVYYCAKDIRGAYSSGLFDYWGRGTLVTVSS

SEQ ID NO: 663 - protein, 122 aa, Artificial Sequence
  Description of Artificial Sequence: Synthetic polypeptide
EVQLLESGGGLVQPGGSLRLSCAASGFTFSHYWMHWVRQAPGKGLEWVSGISPSGGMTMYADSVKGRFTISRDNSKNTLYLQMNSLRAEDTAVYYCAKDIRGAYSSGLFDYWGRGTLVTVSS

SEQ ID NO: 664 - protein, 122 aa, Artificial Sequence
  Description of Artificial Sequence: Synthetic polypeptide
EVQLLESGGGLVQPGGSLRLSCAASGFTFSQYNMHWVRQAPGKGLEWVSGIGPSGGITIYADSVKGRFTISRDNSKNTLYLQMNSLRAEDTAVYYCAKDIRGAYSSGLFDYWGRGTLVTVSS

SEQ ID NO: 665 - protein, 122 aa, Artificial Sequence
  Description of Artificial Sequence: Synthetic polypeptide
EVQLLESGGGLVQPGGSLRLSCAASGFTFSPYWMHWVRQAPGKGLEWVSGISSSGGDTLYADSVKGRFTISRDNSKNTLYLQMNSLRAEDTAVYYCAKDIRGAYSSGLFDYWGRGTLVTVSS

SEQ ID NO: 666 - protein, 122 aa, Artificial Sequence
  Description of Artificial Sequence: Synthetic polypeptide
EVQLLESGGGLVQPGGSLRLSCAASGFTFSPYWMHWVRQAPGKGLEWVSGIGPSGGPTFYADSIKGRFTISRDNSKNTLYLQMNSLRAEDTAVYYCAKDIRGAYSSGLFDYWGRGTLVTVSS

SEQ ID NO: 667 - protein, 122 aa, Artificial Sequence
  Description of Artificial Sequence: Synthetic polypeptide
EVQLLESGGGLVQPGGSLRLSCAASGFTFSAYGMSWVRQAPGKGLEWVSRISPSGGITGYADSVKGRFTISRDNSKNTLYLQMNSLRAEDTAVYYCAKDIRGAYSSGLFDYWGRGTLVTVSS

SEQ ID NO: 668 - protein, 122 aa, Artificial Sequence
  Description of Artificial Sequence: Synthetic polypeptide
EVQLLESGGGLVQPGGSLRLSCAASGFTFSWYYMGWVRQAPGKGLEWVSSISPSGGWTRYADSVKGRFTISRDNSKNTLYLQMNSLRAEDTAVYYCAKDIRGAYSSGLFDYWGRGTLVTVSS

SEQ ID NO: 669 - protein, 122 aa, Artificial Sequence
  Description of Artificial Sequence: Synthetic polypeptide
EVQLLESGGGLVQPGGSLRLSCAASGFTFSFYWMDWVRQAPGKGLEWVSSISPSGGTTIYADSVKGRFTISRDNSKNTLYLQMNSLRAEDTAVYYCAKDIRGAYSSGLFDYWGRGTLVTVSS

SEQ ID NO: 670 - protein, 122 aa, Artificial Sequence
  Description of Artificial Sequence: Synthetic polypeptide
EVQLLESGGGLVQPGGSLRLSCAASGFTFSDYNMHWVRQAPGKGLEWVSYIGPSGGYTHYADSVKGRFTISRDNSKNTLYLQMNSLRAEDTAVYYCAKDIRGAYSSGLFDYWGRGTLVTVSS

SEQ ID NO: 671 - protein, 122 aa, Artificial Sequence
  Description of Artificial Sequence: Synthetic polypeptide
EVQLLESGGGLVQPGGSLRLSCAASGFTFSWYWMVWVRQAPGKGLEWVSSIVPSGGFTIYADSVKGRFTISRDNSKNTLYLQMNSLRAEDTAVYYCAKDIRGAYSSGLFDYWGRGTLVTVSS

SEQ ID NO: 672 - protein, 122 aa, Artificial Sequence
  Description of Artificial Sequence: Synthetic polypeptide
EVQLLESGGGLVQPGGSLRLSCAASGFTFSRYMMHWVRQAPGKGLEWVSYISSSGGTTIYADSVKGRFTISRDNSKNTLYLQMNSLRAEDTAVYYCAKDIRGAYSSGLFDYWGRGTLVTVSS

SEQ ID NO: 673 - protein, 122 aa, Artificial Sequence
  Description of Artificial Sequence: Synthetic polypeptide
EVQLLESGGGLVQPGGSLRLSCAASGFTFSHYWMQWVRQAPGKGLEWVSGIVPSGGLTMYADSVKGRFTISRDNSKNTLYLQMNSLRAEDTAVYYCAKDIRGAYSSGLFDYWGRGTLVTVSS

SEQ ID NO: 674 - protein, 122 aa, Artificial Sequence; identical to SEQ ID NO: 670
  Description of Artificial Sequence: Synthetic polypeptide

SEQ ID NO: 675 - protein, 122 aa, Artificial Sequence
  Description of Artificial Sequence: Synthetic polypeptide
EVQLLESGGGLVQPGGSLRLSCAASGFTFSDYWMAWVRQAPGKGLEWVSSIGPSGGFTVYADSVKGRFTISRDNSKNTLYLQMNSLRAEDTAVYYCAKDIRGAYSSGLFDYWGRGTLVTVSS

SEQ ID NO: 676 - protein, 24 aa, Artificial Sequence
  Description of Artificial Sequence: Synthetic peptide
QDIQMTQSPSSLSASVGDRVTITC

SEQ ID NO: 677 - protein, 24 aa, Artificial Sequence
  Description of Artificial Sequence: Synthetic peptide
QDIQMTQSPSSLSASVGDRVTITC

SEQ ID NO: 678 - protein, 24 aa, Artificial Sequence
  Description of Artificial Sequence: Synthetic peptide
QDIQMTQSPSSLSASVGDRVTITC

SEQ ID NO: 679 - protein, 24 aa, Artificial Sequence
  Description of Artificial Sequence: Synthetic peptide
QDIQMTQSPSSLSASVGDRVTITC

SEQ ID NO: 680 - protein, 24 aa, Artificial Sequence
  Description of Artificial Sequence: Synthetic peptide
QDIQMTQSPSSLSASVGDRVTITC

SEQ ID NO: 681 - protein, 24 aa, Artificial Sequence
  Description of Artificial Sequence: Synthetic peptide
QDIQMTQSPSSLSASVGDRVTITC

SEQ ID NO: 682 - protein, 24 aa, Artificial Sequence
  Description of Artificial Sequence: Synthetic peptide
QDIQMTQSPSSLSASVGDRVTITC

SEQ ID NO: 683 - protein, 24 aa, Artificial Sequence
  Description of Artificial Sequence: Synthetic peptide
QDIQMTQSPSSLSASVGDRVTITC

SEQ ID NO: 684 - protein, 24 aa, Artificial Sequence
  Description of Artificial Sequence: Synthetic peptide
QDIQMTQSPSSLSASVGDRVTITC

SEQ ID NO: 685 - protein, 24 aa, Artificial Sequence
  Description of Artificial Sequence: Synthetic peptide
QDIQMTQSPSSLSASVGDRVTITC

SEQ ID NO: 686 - protein, 24 aa, Artificial Sequence
  Description of Artificial Sequence: Synthetic peptide
QDIQMTQSPSSLSASVGDRVTITC

SEQ ID NO: 687 - protein, 24 aa, Artificial Sequence
  Description of Artificial Sequence: Synthetic peptide
QDIQMTQSPSSLSASVGDRVTITC

SEQ ID NO: 688 - protein, 24 aa, Artificial Sequence
  Description of Artificial Sequence: Synthetic peptide
QDIQMTQSPSSLSASVGDRVTITC

SEQ ID NO: 689 - protein, 24 aa, Artificial Sequence
  Description of Artificial Sequence: Synthetic peptide
QDIQMTQSPSSLSASVGDRVTITC

SEQ ID NO: 690 - protein, 24 aa, Artificial Sequence
  Description of Artificial Sequence: Synthetic peptide
QDIQMTQSPSSLSASVGDRVTITC

SEQ ID NO: 691 - protein, 24 aa, Artificial Sequence
  Description of Artificial Sequence: Synthetic peptide
QDIQMTQSPSSLSASVGDRVTITC

SEQ ID NO: 692 - protein, 24 aa, Artificial Sequence
  Description of Artificial Sequence: Synthetic peptide
QDIQMTQSPSSLSASVGDRVTITC

SEQ ID NO: 693 - protein, 24 aa, Artificial Sequence
  Description of Artificial Sequence: Synthetic peptide
QDIQMTQSPSSLSASVGDRVTITC

SEQ ID NO: 694 - protein, 24 aa, Artificial Sequence
  Description of Artificial Sequence: Synthetic peptide
QDIQMTQSPSSLSASVGDRVTITC

SEQ ID NO: 695 - protein, 24 aa, Artificial Sequence
  Description of Artificial Sequence: Synthetic peptide
QDIQMTQSPSSLSASVGDRVTITC

SEQ ID NO: 696 - protein, 24 aa, Artificial Sequence
  Description of Artificial Sequence: Synthetic peptide
QDIQMTQSPSSLSASVGDRVTITC

SEQ ID NO: 697 - protein, 24 aa, Artificial Sequence
  Description of Artificial Sequence: Synthetic peptide
QDIQMTQSPSSLSASVGDRVTITC

SEQ ID NO: 698 - protein, 24 aa, Artificial Sequence
  Description of Artificial Sequence: Synthetic peptide
QDIQMTQSPSSLSASVGDRVTITC

SEQ ID NO: 699 - protein, 24 aa, Artificial Sequence
  Description of Artificial Sequence: Synthetic peptide
QDIQMTQSPSSLSASVGDRVTITC

SEQ ID NO: 700 - protein, 24 aa, Artificial Sequence
  Description of Artificial Sequence: Synthetic peptide
QDIQMTQSPSSLSASVGDRVTITC

SEQ ID NO: 701 - protein, 11 aa, Artificial Sequence
  Description of Artificial Sequence: Synthetic peptide
RANQSIYTYLN

SEQ ID NO: 702 - protein, 11 aa, Artificial Sequence
  Description of Artificial Sequence: Synthetic peptide
RANQSIYTYLN

SEQ ID NO: 703 - protein, 11 aa, Artificial Sequence
  Description of Artificial Sequence: Synthetic peptide
RANQSIYTYLN

SEQ ID NO: 704 - protein, 11 aa, Artificial Sequence
  Description of Artificial Sequence: Synthetic peptide
RANQSIYTYLN

SEQ ID NO: 705 - protein, 11 aa, Artificial Sequence
  Description of Artificial Sequence: Synthetic peptide
RANQSIYTYLN

SEQ ID NO: 706 - protein, 11 aa, Artificial Sequence
  Description of Artificial Sequence: Synthetic peptide
RANQSIYTYLN

SEQ ID NO: 707 - protein, 11 aa, Artificial Sequence
  Description of Artificial Sequence: Synthetic peptide
RANQSIYTYLN

SEQ ID NO: 708 - protein, 11 aa, Artificial Sequence
  Description of Artificial Sequence: Synthetic peptide
RANQSIYTYLN

SEQ ID NO: 709 - protein, 11 aa, Artificial Sequence
  Description of Artificial Sequence: Synthetic peptide
RANQSIYTYLN

SEQ ID NO: 710 - protein, 11 aa, Artificial Sequence
  Description of Artificial Sequence: Synthetic peptide
RANQSIYTYLN

SEQ ID NO: 711 - protein, 11 aa, Artificial Sequence
  Description of Artificial Sequence: Synthetic peptide
RANQSIYTYLN

SEQ ID NO: 712 - protein, 11 aa, Artificial Sequence
  Description of Artificial Sequence: Synthetic peptide
RANQSIYTYLN

SEQ ID NO: 713 - protein, 11 aa, Artificial Sequence
  Description of Artificial Sequence: Synthetic peptide
RANQSIYTYLN

SEQ ID NO: 714 - protein, 11 aa, Artificial Sequence
  Description of Artificial Sequence: Synthetic peptide
RANQSIYTYLN

SEQ ID NO: 715 - protein, 11 aa, Artificial Sequence
  Description of Artificial Sequence: Synthetic peptide
RANQSIYTYLN

SEQ ID NO: 716 - protein, 11 aa, Artificial Sequence
  Description of Artificial Sequence: Synthetic peptide
RANQSIYTYLN

SEQ ID NO: 717 - protein, 11 aa, Artificial Sequence
  Description of Artificial Sequence: Synthetic peptide
RANQSIYTYLN

SEQ ID NO: 718 - protein, 11 aa, Artificial Sequence
  Description of Artificial Sequence: Synthetic peptide
RANQSIYTYLN

SEQ ID NO: 719 - protein, 11 aa, Artificial Sequence
  Description of Artificial Sequence: Synthetic peptide
RANQSIYTYLN

SEQ ID NO: 720 - protein, 11 aa, Artificial Sequence
  Description of Artificial Sequence: Synthetic peptide
RANQSIYTYLN

SEQ ID NO: 721 - protein, 11 aa, Artificial Sequence
  Description of Artificial Sequence: Synthetic peptide
RANQSIYTYLN

SEQ ID NO: 722 - protein, 11 aa, Artificial Sequence
  Description of Artificial Sequence: Synthetic peptide
RANQSIYTYLN

SEQ ID NO: 723 - protein, 11 aa, Artificial Sequence
  Description of Artificial Sequence: Synthetic peptide
RANQSIYTYLN

SEQ ID NO: 724 - protein, 11 aa, Artificial Sequence
  Description of Artificial Sequence: Synthetic peptide
RANQSIYTYLN

SEQ ID NO: 725 - protein, 11 aa, Artificial Sequence
  Description of Artificial Sequence: Synthetic peptide
RANQSIYTYLN

SEQ ID NO: 726 - protein, 15 aa, Artificial Sequence
  Description of Artificial Sequence: Synthetic peptide
WYQQKPGKAPELLIY

SEQ ID NO: 727 - protein, 15 aa, Artificial Sequence
  Description of Artificial Sequence: Synthetic peptide
WYQQKPGKAPELLIY

SEQ ID NO: 728 - protein, 15 aa, Artificial Sequence
  Description of Artificial Sequence: Synthetic peptide
WYQQKPGKAPELLIY

SEQ ID NO: 729 - protein, 15 aa, Artificial Sequence
  Description of Artificial Sequence: Synthetic peptide
WYQQKPGKAPELLIY

SEQ ID NO: 730 - protein, 15 aa, Artificial Sequence
  Description of Artificial Sequence: Synthetic peptide
WYQQKPGKAPELLIY

SEQ ID NO: 731 - protein, 15 aa, Artificial Sequence
  Description of Artificial Sequence: Synthetic peptide
WYQQKPGKAPELLIY

SEQ ID NO: 732 - protein, 15 aa, Artificial Sequence
  Description of Artificial Sequence: Synthetic peptide
WYQQKPGKAPELLIY

SEQ ID NO: 733 - protein, 15 aa, Artificial Sequence
  Description of Artificial Sequence: Synthetic peptide
WYQQKPGKAPELLIY

SEQ ID NO: 734 - protein, 15 aa, Artificial Sequence
  Description of Artificial Sequence: Synthetic peptide
WYQQKPGKAPELLIY

SEQ ID NO: 735 - protein, 15 aa, Artificial Sequence
  Description of Artificial Sequence: Synthetic peptide
WYQQKPGKAPELLIY

SEQ ID NO: 736 - protein, 15 aa, Artificial Sequence
  Description of Artificial Sequence: Synthetic peptide
WYQQKPGKAPELLIY

SEQ ID NO: 737 - protein, 15 aa, Artificial Sequence
  Description of Artificial Sequence: Synthetic peptide
WYQQKPGKAPELLIY

SEQ ID NO: 738 - protein, 15 aa, Artificial Sequence
  Description of Artificial Sequence: Synthetic peptide
WYQQKPGKAPELLIY

SEQ ID NO: 739 - protein, 15 aa, Artificial Sequence
  Description of Artificial Sequence: Synthetic peptide
WYQQKPGKAPELLIY

SEQ ID NO: 740 - protein, 15 aa, Artificial Sequence
  Description of Artificial Sequence: Synthetic peptide
WYQQKPGKAPELLIY

SEQ ID NO: 741 - protein, 15 aa, Artificial Sequence
  Description of Artificial Sequence: Synthetic peptide
WYQQKPGKAPELLIY

SEQ ID NO: 742 - protein, 15 aa, Artificial Sequence
  Description of Artificial Sequence: Synthetic peptide
WYQQKPGKAPELLIY

SEQ ID NO: 743 - protein, 15 aa, Artificial Sequence
  Description of Artificial Sequence: Synthetic peptide
WYQQKPGKAPELLIY

SEQ ID NO: 744 - protein, 15 aa, Artificial Sequence
  Description of Artificial Sequence: Synthetic peptide
WYQQKPGKAPELLIY

SEQ ID NO: 745 - protein, 15 aa, Artificial Sequence
  Description of Artificial Sequence: Synthetic peptide
WYQQKPGKAPELLIY

SEQ ID NO: 746 - protein, 15 aa, Artificial Sequence
  Description of Artificial Sequence: Synthetic peptide
WYQQKPGKAPELLIY

SEQ ID NO: 747 - protein, 15 aa, Artificial Sequence
  Description of Artificial Sequence: Synthetic peptide
WYQQKPGKAPELLIY

SEQ ID NO: 748 - protein, 15 aa, Artificial Sequence
  Description of Artificial Sequence: Synthetic peptide
WYQQKPGKAPELLIY

SEQ ID NO: 749 - protein, 15 aa, Artificial Sequence
  Description of Artificial Sequence: Synthetic peptide
WYQQKPGKAPELLIY

SEQ ID NO: 750 - protein, 15 aa, Artificial Sequence
  Description of Artificial Sequence: Synthetic peptide
WYQQKPGKAPELLIY

SEQ ID NO: 751 - protein, 7 aa, Artificial Sequence
  Description of Artificial Sequence: Synthetic peptide
AASSLQS

SEQ ID NO: 752 - protein, 7 aa, Artificial Sequence
  Description of Artificial Sequence: Synthetic peptide
AASSLQS

SEQ ID NO: 753 - protein, 7 aa, Artificial Sequence
  Description of Artificial Sequence: Synthetic peptide
AASSLQS

SEQ ID NO: 754 - protein, 7 aa, Artificial Sequence
  Description of Artificial Sequence: Synthetic peptide
AASSLQS

SEQ ID NO: 755 - protein, 7 aa, Artificial Sequence
  Description of Artificial Sequence: Synthetic peptide
AASSLQS

SEQ ID NO: 756 - protein, 7 aa, Artificial Sequence
  Description of Artificial Sequence: Synthetic peptide
AASSLQS

SEQ ID NO: 757 - protein, 7 aa, Artificial Sequence
  Description of Artificial Sequence: Synthetic peptide
AASSLQS

SEQ ID NO: 758 - protein, 7 aa, Artificial Sequence
  Description of Artificial Sequence: Synthetic peptide
AASSLQS

SEQ ID NO: 759 - protein, 7 aa, Artificial Sequence
  Description of Artificial Sequence: Synthetic peptide
AASSLQS

SEQ ID NO: 760 - protein, 7 aa, Artificial Sequence
  Description of Artificial Sequence: Synthetic peptide
AASSLQS

SEQ ID NO: 761 - protein, 7 aa, Artificial Sequence
  Description of Artificial Sequence: Synthetic peptide
AASSLQS

SEQ ID NO: 762 - protein, 7 aa, Artificial Sequence
  Description of Artificial Sequence: Synthetic peptide
AASSLQS

SEQ ID NO: 763 - protein, 7 aa, Artificial Sequence
  Description of Artificial Sequence: Synthetic peptide
AASSLQS

SEQ ID NO: 764 - protein, 7 aa, Artificial Sequence
  Description of Artificial Sequence: Synthetic peptide
AASSLQS

SEQ ID NO: 765 - protein, 7 aa, Artificial Sequence
  Description of Artificial Sequence: Synthetic peptide
AASSLQS

SEQ ID NO: 766 - protein, 7 aa, Artificial Sequence
  Description of Artificial Sequence: Synthetic peptide
AASSLQS

SEQ ID NO: 767 - protein, 7 aa, Artificial Sequence
  Description of Artificial Sequence: Synthetic peptide
AASSLQS

SEQ ID NO: 768 - protein, 7 aa, Artificial Sequence
  Description of Artificial Sequence: Synthetic peptide
AASSLQS

SEQ ID NO: 769 - protein, 7 aa, Artificial Sequence
  Description of Artificial Sequence: Synthetic peptide
AASSLQS

SEQ ID NO: 770 - protein, 7 aa, Artificial Sequence
  Description of Artificial Sequence: Synthetic peptide
AASSLQS

SEQ ID NO: 771 - protein, 7 aa, Artificial Sequence
  Description of Artificial Sequence: Synthetic peptide
AASSLQS

SEQ ID NO: 772 - protein, 7 aa, Artificial Sequence
  Description of Artificial Sequence: Synthetic peptide
AASSLQS

SEQ ID NO: 773 - protein, 7 aa, Artificial Sequence
  Description of Artificial Sequence: Synthetic peptide
AASSLQS

SEQ ID NO: 774 - protein, 7 aa, Artificial Sequence
  Description of Artificial Sequence: Synthetic peptide
AASSLQS

SEQ ID NO: 775 - protein, 7 aa, Artificial Sequence
  Description of Artificial Sequence: Synthetic peptide
AASSLQS

SEQ ID NO: 776 - protein, 32 aa, Artificial Sequence; identical to SEQ ID NO: 186
  Description of Artificial Sequence: Synthetic polypeptide

SEQ ID NO: 777 - protein, 32 aa, Artificial Sequence; identical to SEQ ID NO: 186
  Description of Artificial Sequence: Synthetic polypeptide

SEQ ID NO: 778 - protein, 32 aa, Artificial Sequence; identical to SEQ ID NO: 186
  Description of Artificial Sequence: Synthetic polypeptide

SEQ ID NO: 779 - protein, 32 aa, Artificial Sequence; identical to SEQ ID NO: 186
  Description of Artificial Sequence: Synthetic polypeptide

SEQ ID NO: 780 - protein, 32 aa, Artificial Sequence; identical to SEQ ID NO: 186
  Description of Artificial Sequence: Synthetic polypeptide

SEQ ID NO: 781 - protein, 32 aa, Artificial Sequence; identical to SEQ ID NO: 186
  Description of Artificial Sequence: Synthetic polypeptide

SEQ ID NO: 782 - protein, 32 aa, Artificial Sequence; identical to SEQ ID NO: 186
  Description of Artificial Sequence: Synthetic polypeptide

SEQ ID NO: 783 - protein, 32 aa, Artificial Sequence; identical to SEQ ID NO: 186
  Description of Artificial Sequence: Synthetic polypeptide

SEQ ID NO: 784 - protein, 32 aa, Artificial Sequence; identical to SEQ ID NO: 186
  Description of Artificial Sequence: Synthetic polypeptide

SEQ ID NO: 785 - protein, 32 aa, Artificial Sequence; identical to SEQ ID NO: 186
  Description of Artificial Sequence: Synthetic polypeptide

SEQ ID NO: 786 - protein, 32 aa, Artificial Sequence; identical to SEQ ID NO: 186
  Description of Artificial Sequence: Synthetic polypeptide

SEQ ID NO: 787 - protein, 32 aa, Artificial Sequence; identical to SEQ ID NO: 186
  Description of Artificial Sequence: Synthetic polypeptide

SEQ ID NO: 788 - protein, 32 aa, Artificial Sequence; identical to SEQ ID NO: 186
  Description of Artificial Sequence: Synthetic polypeptide

SEQ ID NO: 789 - protein, 32 aa, Artificial Sequence; identical to SEQ ID NO: 186
  Description of Artificial Sequence: Synthetic polypeptide

SEQ ID NO: 790 - protein, 32 aa, Artificial Sequence; identical to SEQ ID NO: 186
  Description of Artificial Sequence: Synthetic polypeptide

SEQ ID NO: 791 - protein, 32 aa, Artificial Sequence; identical to SEQ ID NO: 186
  Description of Artificial Sequence: Synthetic polypeptide

SEQ ID NO: 792 - protein, 32 aa, Artificial Sequence; identical to SEQ ID NO: 186
  Description of Artificial Sequence: Synthetic polypeptide

SEQ ID NO: 793 - protein, 32 aa, Artificial Sequence; identical to SEQ ID NO: 186
  Description of Artificial Sequence: Synthetic polypeptide

SEQ ID NO: 794 - protein, 32 aa, Artificial Sequence; identical to SEQ ID NO: 186
  Description of Artificial Sequence: Synthetic polypeptide

SEQ ID NO: 795 - protein, 32 aa, Artificial Sequence; identical to SEQ ID NO: 186
  Description of Artificial Sequence: Synthetic polypeptide

SEQ ID NO: 796 - protein, 32 aa, Artificial Sequence; identical to SEQ ID NO: 186
  Description of Artificial Sequence: Synthetic polypeptide

SEQ ID NO: 797 - protein, 32 aa, Artificial Sequence; identical to SEQ ID NO: 186
  Description of Artificial Sequence: Synthetic polypeptide

SEQ ID NO: 798 - protein, 32 aa, Artificial Sequence; identical to SEQ ID NO: 186
  Description of Artificial Sequence: Synthetic polypeptide

SEQ ID NO: 799 - protein, 32 aa, Artificial Sequence; identical to SEQ ID NO: 186
  Description of Artificial Sequence: Synthetic polypeptide

SEQ ID NO: 800 - protein, 32 aa, Artificial Sequence; identical to SEQ ID NO: 186
  Description of Artificial Sequence: Synthetic polypeptide

SEQ ID NO: 801 - protein, 5 aa, Artificial Sequence
  Description of Artificial Sequence: Synthetic peptide
QQAGI

SEQ ID NO: 802 - protein, 5 aa, Artificial Sequence
  Description of Artificial Sequence: Synthetic peptide
QQAGI

SEQ ID NO: 803 - protein, 5 aa, Artificial Sequence
  Description of Artificial Sequence: Synthetic peptide
QQAGI

SEQ ID NO: 804 - protein, 5 aa, Artificial Sequence
  Description of Artificial Sequence: Synthetic peptide
QQAGI

SEQ ID NO: 805 - protein, 5 aa, Artificial Sequence
  Description of Artificial Sequence: Synthetic peptide
QQAGI

SEQ ID NO: 806 - protein, 5 aa, Artificial Sequence
  Description of Artificial Sequence: Synthetic peptide
QQAGI

SEQ ID NO: 807 - protein, 5 aa, Artificial Sequence
  Description of Artificial Sequence: Synthetic peptide
QQAGI

SEQ ID NO: 808 - protein, 5 aa, Artificial Sequence
  Description of Artificial Sequence: Synthetic peptide
QQAGI

SEQ ID NO: 809 - protein, 5 aa, Artificial Sequence
  Description of Artificial Sequence: Synthetic peptide
QQAGI

SEQ ID NO: 810 - protein, 5 aa, Artificial Sequence
  Description of Artificial Sequence: Synthetic peptide
QQAGI

SEQ ID NO: 811 - protein, 5 aa, Artificial Sequence
  Description of Artificial Sequence: Synthetic peptide
QQAGI

SEQ ID NO: 812 - protein, 5 aa, Artificial Sequence
  Description of Artificial Sequence: Synthetic peptide
QQAGI

SEQ ID NO: 813 - protein, 5 aa, Artificial Sequence
  Description of Artificial Sequence: Synthetic peptide
QQAGI

SEQ ID NO: 814 - protein, 5 aa, Artificial Sequence
  Description of Artificial Sequence: Synthetic peptide
QQAGI

SEQ ID NO: 815 - protein, 5 aa, Artificial Sequence
  Description of Artificial Sequence: Synthetic peptide
QQAGI

SEQ ID NO: 816 - protein, 5 aa, Artificial Sequence
  Description of Artificial Sequence: Synthetic peptide
QQAGI

SEQ ID NO: 817 - protein, 5 aa, Artificial Sequence
  Description of Artificial Sequence: Synthetic peptide
QQAGI

SEQ ID NO: 818 - protein, 5 aa, Artificial Sequence
  Description of Artificial Sequence: Synthetic peptide
QQAGI

SEQ ID NO: 819 - protein, 5 aa, Artificial Sequence
  Description of Artificial Sequence: Synthetic peptide
QQAGI

SEQ ID NO: 820 - protein, 5 aa, Artificial Sequence
  Description of Artificial Sequence: Synthetic peptide
QQAGI

SEQ ID NO: 821 - protein, 5 aa, Artificial Sequence
  Description of Artificial Sequence: Synthetic peptide
QQAGI

SEQ ID NO: 822 - protein, 5 aa, Artificial Sequence
  Description of Artificial Sequence: Synthetic peptide
QQAGI

SEQ ID NO: 823 - protein, 5 aa, Artificial Sequence
  Description of Artificial Sequence: Synthetic peptide
QQAGI

SEQ ID NO: 824 - protein, 5 aa, Artificial Sequence
  Description of Artificial Sequence: Synthetic peptide
QQAGI

SEQ ID NO: 825 - protein, 5 aa, Artificial Sequence
  Description of Artificial Sequence: Synthetic peptide
QQAGI

SEQ ID NO: 826 - protein, 10 aa, Artificial Sequence
  Description of Artificial Sequence: Synthetic peptide
FGQGTKLEIK

SEQ ID NO: 827 - protein, 10 aa, Artificial Sequence
  Description of Artificial Sequence: Synthetic peptide
FGQGTKLEIK

SEQ ID NO: 828 - protein, 10 aa, Artificial Sequence
  Description of Artificial Sequence: Synthetic peptide
FGQGTKLEIK

SEQ ID NO: 829 - protein, 10 aa, Artificial Sequence
  Description of Artificial Sequence: Synthetic peptide
FGQGTKLEIK

SEQ ID NO: 830 - protein, 10 aa, Artificial Sequence
  Description of Artificial Sequence: Synthetic peptide
FGQGTKLEIK

SEQ ID NO: 831 - protein, 10 aa, Artificial Sequence
  Description of Artificial Sequence: Synthetic peptide
FGQGTKLEIK

SEQ ID NO: 832 - protein, 10 aa, Artificial Sequence
  Description of Artificial Sequence: Synthetic peptide
FGQGTKLEIK

SEQ ID NO: 833 - protein, 10 aa, Artificial Sequence
  Description of Artificial Sequence: Synthetic peptide
FGQGTKLEIK

SEQ ID NO: 834 - protein, 10 aa, Artificial Sequence
  Description of Artificial Sequence: Synthetic peptide
FGQGTKLEIK

SEQ ID NO: 835 - protein, 10 aa, Artificial Sequence
  Description of Artificial Sequence: Synthetic peptide
FGQGTKLEIK

SEQ ID NO: 836 - protein, 10 aa, Artificial Sequence
  Description of Artificial Sequence: Synthetic peptide
FGQGTKLEIK

SEQ ID NO: 837 - protein, 10 aa, Artificial Sequence
  Description of Artificial Sequence: Synthetic peptide
FGQGTKLEIK

SEQ ID NO: 838 - protein, 10 aa, Artificial Sequence
  Description of Artificial Sequence: Synthetic peptide
FGQGTKLEIK

SEQ ID NO: 839 - protein, 10 aa, Artificial Sequence
  Description of Artificial Sequence: Synthetic peptide
FGQGTKLEIK

SEQ ID NO: 840 - protein, 10 aa, Artificial Sequence
  Description of Artificial Sequence: Synthetic peptide
FGQGTKLEIK

SEQ ID NO: 841 - protein, 10 aa, Artificial Sequence
  Description of Artificial Sequence: Synthetic peptide
FGQGTKLEIK

SEQ ID NO: 842 - protein, 10 aa, Artificial Sequence
  Description of Artificial Sequence: Synthetic peptide
FGQGTKLEIK

SEQ ID NO: 843 - protein, 10 aa, Artificial Sequence
  Description of Artificial Sequence: Synthetic peptide
FGQGTKLEIK

SEQ ID NO: 844 - protein, 10 aa, Artificial Sequence
  Description of Artificial Sequence: Synthetic peptide
FGQGTKLEIK

SEQ ID NO: 845 - protein, 10 aa, Artificial Sequence
  Description of Artificial Sequence: Synthetic peptide
FGQGTKLEIK

SEQ ID NO: 846 - protein, 10 aa, Artificial Sequence
  Description of Artificial Sequence: Synthetic peptide
FGQGTKLEIK

SEQ ID NO: 847 - protein, 10 aa, Artificial Sequence
  Description of Artificial Sequence: Synthetic peptide
FGQGTKLEIK

SEQ ID NO: 848 - protein, 10 aa, Artificial Sequence
  Description of Artificial Sequence: Synthetic peptide
FGQGTKLEIK

SEQ ID NO: 849 - protein, 10 aa, Artificial Sequence
  Description of Artificial Sequence: Synthetic peptide
FGQGTKLEIK

SEQ ID NO: 850 - protein, 10 aa, Artificial Sequence
  Description of Artificial Sequence: Synthetic peptide
FGQGTKLEIK

SEQ ID NO: 851 - protein, 30 aa, Artificial Sequence; identical to SEQ ID NO: 322
  Description of Artificial Sequence: Synthetic polypeptide

SEQ ID NO: 852 - protein, 30 aa, Artificial Sequence; identical to SEQ ID NO: 322
  Description of Artificial Sequence: Synthetic polypeptide

SEQ ID NO: 853 - protein, 30 aa, Artificial Sequence; identical to SEQ ID NO: 322
  Description of Artificial Sequence: Synthetic polypeptide

SEQ ID NO: 854 - protein, 30 aa, Artificial Sequence; identical to SEQ ID NO: 322
  Description of Artificial Sequence: Synthetic polypeptide

SEQ ID NO: 855 - protein, 30 aa, Artificial Sequence; identical to SEQ ID NO: 322
  Description of Artificial Sequence: Synthetic polypeptide

SEQ ID NO: 856 - protein, 30 aa, Artificial Sequence; identical to SEQ ID NO: 322
  Description of Artificial Sequence: Synthetic polypeptide

SEQ ID NO: 857 - protein, 30 aa, Artificial Sequence; identical to SEQ ID NO: 322
  Description of Artificial Sequence: Synthetic polypeptide

SEQ ID NO: 858 - protein, 30 aa, Artificial Sequence; identical to SEQ ID NO: 322
  Description of Artificial Sequence: Synthetic polypeptide

SEQ ID NO: 859 - protein, 30 aa, Artificial Sequence; identical to SEQ ID NO: 322
  Description of Artificial Sequence: Synthetic polypeptide

SEQ ID NO: 860 - protein, 30 aa, Artificial Sequence; identical to SEQ ID NO: 322
  Description of Artificial Sequence: Synthetic polypeptide

SEQ ID NO: 861 - protein, 30 aa, Artificial Sequence; identical to SEQ ID NO: 322
  Description of Artificial Sequence: Synthetic polypeptide

SEQ ID NO: 862 - protein, 30 aa, Artificial Sequence; identical to SEQ ID NO: 322
  Description of Artificial Sequence: Synthetic polypeptide

SEQ ID NO: 863 - protein, 30 aa, Artificial Sequence; identical to SEQ ID NO: 322
  Description of Artificial Sequence: Synthetic polypeptide

SEQ ID NO: 864 - protein, 30 aa, Artificial Sequence; identical to SEQ ID NO: 322
  Description of Artificial Sequence: Synthetic polypeptide

SEQ ID NO: 865 - protein, 30 aa, Artificial Sequence; identical to SEQ ID NO: 322
  Description of Artificial Sequence: Synthetic polypeptide

SEQ ID NO: 866 - protein, 30 aa, Artificial Sequence; identical to SEQ ID NO: 322
  Description of Artificial Sequence: Synthetic polypeptide

SEQ ID NO: 867 - protein, 30 aa, Artificial Sequence; identical to SEQ ID NO: 322
  Description of Artificial Sequence: Synthetic polypeptide

SEQ ID NO: 868 - protein, 30 aa, Artificial Sequence; identical to SEQ ID NO: 322
  Description of Artificial Sequence: Synthetic polypeptide

SEQ ID NO: 869 - protein, 30 aa, Artificial Sequence; identical to SEQ ID NO: 322
  Description of Artificial Sequence: Synthetic polypeptide

SEQ ID NO: 870 - protein, 30 aa, Artificial Sequence; identical to SEQ ID NO: 322
  Description of Artificial Sequence: Synthetic polypeptide

SEQ ID NO: 871 - protein, 30 aa, Artificial Sequence; identical to SEQ ID NO: 322
  Description of Artificial Sequence: Synthetic polypeptide

SEQ ID NO: 872 - protein, 30 aa, Artificial Sequence; identical to SEQ ID NO: 322
  Description of Artificial Sequence: Synthetic polypeptide

SEQ ID NO: 873 - protein, 30 aa, Artificial Sequence; identical to SEQ ID NO: 322
  Description of Artificial Sequence: Synthetic polypeptide

SEQ ID NO: 874 - protein, 30 aa, Artificial Sequence; identical to SEQ ID NO: 322
  Description of Artificial Sequence: Synthetic polypeptide

SEQ ID NO: 875 - protein, 30 aa, Artificial Sequence; identical to SEQ ID NO: 322
  Description of Artificial Sequence: Synthetic polypeptide

SEQ ID NO: 876 - protein, 5 aa, Artificial Sequence
  Description of Artificial Sequence: Synthetic peptide
PYWMH

SEQ ID NO: 877 - protein, 5 aa, Artificial Sequence
  Description of Artificial Sequence: Synthetic peptide
QYFMH

SEQ ID NO: 878 - protein, 5 aa, Artificial Sequence
  Description of Artificial Sequence: Synthetic peptide
PYWMH

SEQ ID NO: 879 - protein, 5 aa, Artificial Sequence
  Description of Artificial Sequence: Synthetic peptide
DYNMH

SEQ ID NO: 880 - protein, 5 aa, Artificial Sequence
  Description of Artificial Sequence: Synthetic peptide
WYWMH

SEQ ID NO: 881 - protein, 5 aa, Artificial Sequence
  Description of Artificial Sequence: Synthetic peptide
EYNMH

SEQ ID NO: 882 - protein, 5 aa, Artificial Sequence
  Description of Artificial Sequence: Synthetic peptide
EYNMH

SEQ ID NO: 883 - protein, 5 aa, Artificial Sequence
  Description of Artificial Sequence: Synthetic peptide
PYWMH

SEQ ID NO: 884 - protein, 5 aa, Artificial Sequence
  Description of Artificial Sequence: Synthetic peptide
EYNMH

SEQ ID NO: 885 - protein, 5 aa, Artificial Sequence
  Description of Artificial Sequence: Synthetic peptide
EYNMH

SEQ ID NO: 886 - protein, 5 aa, Artificial Sequence
  Description of Artificial Sequence: Synthetic peptide
PYWMH

SEQ ID NO: 887 - protein, 5 aa, Artificial Sequence
  Description of Artificial Sequence: Synthetic peptide
PYWMH

SEQ ID NO: 888 - protein, 5 aa, Artificial Sequence
  Description of Artificial Sequence: Synthetic peptide
WYWMH

SEQ ID NO: 889 - protein, 5 aa, Artificial Sequence
  Description of Artificial Sequence: Synthetic peptide
WYWMH

SEQ ID NO: 890 - protein, 5 aa, Artificial Sequence
  Description of Artificial Sequence: Synthetic peptide
PYWMH

SEQ ID NO: 891 - protein, 5 aa, Artificial Sequence
  Description of Artificial Sequence: Synthetic peptide
WYWMH

SEQ ID NO: 892 - protein, 5 aa, Artificial Sequence
  Description of Artificial Sequence: Synthetic peptide
YYNMH

SEQ ID NO: 893 - protein, 5 aa, Artificial Sequence
  Description of Artificial Sequence: Synthetic peptide
WYGMH

SEQ ID NO: 894 - protein, 5 aa, Artificial Sequence
  Description of Artificial Sequence: Synthetic peptide
YYNMH

SEQ ID NO: 895 - protein, 5 aa, Artificial Sequence
  Description of Artificial Sequence: Synthetic peptide
PYNMH

SEQ ID NO: 896 - protein, 5 aa, Artificial Sequence
  Description of Artificial Sequence: Synthetic peptide
PYWMH

SEQ ID NO: 897 - protein, 5 aa, Artificial Sequence
  Description of Artificial Sequence: Synthetic peptide
PYWMH

SEQ ID NO: 898 - protein, 5 aa, Artificial Sequence
  Description of Artificial Sequence: Synthetic peptide
AYWMH

SEQ ID NO: 899 - protein, 5 aa, Artificial Sequence
  Description of Artificial Sequence: Synthetic peptide
WYWMH

SEQ ID NO: 900 - protein, 5 aa, Artificial Sequence
  Description of Artificial Sequence: Synthetic peptide
PYWMH

SEQ ID NO: 901 - protein, 14 aa, Artificial Sequence
  Description of Artificial Sequence: Synthetic peptide
WVRQAPGKGLEWVS

SEQ ID NO: 902 - protein, 14 aa, Artificial Sequence
  Description of Artificial Sequence: Synthetic peptide
WVRQAPGKGLEWVS

SEQ ID NO: 903 - protein, 14 aa, Artificial Sequence
  Description of Artificial Sequence: Synthetic peptide
WVRQAPGKGLEWVS

SEQ ID NO: 904 - protein, 14 aa, Artificial Sequence
  Description of Artificial Sequence: Synthetic peptide
WVRQAPGKGLEWVS

SEQ ID NO: 905 - protein, 14 aa, Artificial Sequence
  Description of Artificial Sequence: Synthetic peptide
WVRQAPGKGLEWVS

SEQ ID NO: 906 - protein, 14 aa, Artificial Sequence
  Description of Artificial Sequence: Synthetic peptide
WVRQAPGKGLEWVS

SEQ ID NO: 907 - protein, 14 aa, Artificial Sequence
  Description of Artificial Sequence: Synthetic peptide
WVRQAPGKGLEWVS

SEQ ID NO: 908 - protein, 14 aa, Artificial Sequence
  Description of Artificial Sequence: Synthetic peptide
WVRQAPGKGLEWVS

SEQ ID NO: 909 - protein, 14 aa, Artificial Sequence
  Description of Artificial Sequence: Synthetic peptide
WVRQAPGKGLEWVS

SEQ ID NO: 910 - protein, 14 aa, Artificial Sequence
  Description of Artificial Sequence: Synthetic peptide
WVRQAPGKGLEWVS

SEQ ID NO: 911 - protein, 14 aa, Artificial Sequence
  Description of Artificial Sequence: Synthetic peptide
WVRQAPGKGLEWVS

SEQ ID NO: 912 - protein, 14 aa, Artificial Sequence
  Description of Artificial Sequence: Synthetic peptide
WVRQAPGKGLEWVS

SEQ ID NO: 913 - protein, 14 aa, Artificial Sequence
  Description of Artificial Sequence: Synthetic peptide
WVRQAPGKGLEWVS

SEQ ID NO: 914 - protein, 14 aa, Artificial Sequence
  Description of Artificial Sequence: Synthetic peptide
WVRQAPGKGLEWVS

SEQ ID NO: 915 - protein, 14 aa, Artificial Sequence
  Description of Artificial Sequence: Synthetic peptide
WVRQAPGKGLEWVS

SEQ ID NO: 916 - protein, 14 aa, Artificial Sequence
  Description of Artificial Sequence: Synthetic peptide
WVRQAPGKGLEWVS

SEQ ID NO: 917 - protein, 14 aa, Artificial Sequence
  Description of Artificial Sequence: Synthetic peptide
WVRQAPGKGLEWVS

SEQ ID NO: 918 - protein, 14 aa, Artificial Sequence
  Description of Artificial Sequence: Synthetic peptide
WVRQAPGKGLEWVS

SEQ ID NO: 919 - protein, 14 aa, Artificial Sequence
  Description of Artificial Sequence: Synthetic peptide
WVRQAPGKGLEWVS

SEQ ID NO: 920 - protein, 14 aa, Artificial Sequence
  Description of Artificial Sequence: Synthetic peptide
WVRQAPGKGLEWVS

SEQ ID NO: 921 - protein, 14 aa, Artificial Sequence
  Description of Artificial Sequence: Synthetic peptide
WVRQAPGKGLEWVS

SEQ ID NO: 922 - protein, 14 aa, Artificial Sequence
  Description of Artificial Sequence: Synthetic peptide
WVRQAPGKGLEWVS

SEQ ID NO: 923 - protein, 14 aa, Artificial Sequence
  Description of Artificial Sequence: Synthetic peptide
WVRQAPGKGLEWVS

SEQ ID NO: 924 - protein, 14 aa, Artificial Sequence
  Description of Artificial Sequence: Synthetic peptide
WVRQAPGKGLEWVS

SEQ ID NO: 925 - protein, 14 aa, Artificial Sequence
  Description of Artificial Sequence: Synthetic peptide
WVRQAPGKGLEWVS

SEQ ID NO: 926 - protein, 17 aa, Artificial Sequence
  Description of Artificial Sequence: Synthetic peptide
GISSSGGDTLYADSVKG

SEQ ID NO: 927 - protein, 17 aa, Artificial Sequence
  Description of Artificial Sequence: Synthetic peptide
GIYPSGGDTFYADSVKG

SEQ ID NO: 928 - protein, 17 aa, Artificial Sequence
  Description of Artificial Sequence: Synthetic peptide
GISSSGGDTLYADSVKG

SEQ ID NO: 929 - protein, 17 aa, Artificial Sequence
  Description of Artificial Sequence: Synthetic peptide
YIGPSGGYTHYADSVKG

SEQ ID NO: 930 - protein, 17 aa, Artificial Sequence
  Description of Artificial Sequence: Synthetic peptide
GIYSSGGDTIYADSVKG

SEQ ID NO: 931 - protein, 17 aa, Artificial Sequence
  Description of Artificial Sequence: Synthetic peptide
GIVPSGGLTHYADSVKG

SEQ ID NO: 932 - protein, 17 aa, Artificial Sequence
  Description of Artificial Sequence: Synthetic peptide
GIGPSGGPTMYADSVKG

SEQ ID NO: 933 - protein, 17 aa, Artificial Sequence
  Description of Artificial Sequence: Synthetic peptide
GIGPSGGPTFYADSVKG

SEQ ID NO: 934 - protein, 17 aa, Artificial Sequence
  Description of Artificial Sequence: Synthetic peptide
GIVPSGGLTHYADSVKG

SEQ ID NO: 935 - protein, 17 aa, Artificial Sequence
  Description of Artificial Sequence: Synthetic peptide
GIVPSGGLTHYADSVKG

SEQ ID NO: 936 - protein, 17 aa, Artificial Sequence
  Description of Artificial Sequence: Synthetic peptide
GISPSGGETIYADSVKG

SEQ ID NO: 937 - protein, 17 aa, Artificial Sequence
  Description of Artificial Sequence: Synthetic peptide
GISPSGGHTMYADSVKG

SEQ ID NO: 938 - protein, 17 aa, Artificial Sequence
  Description of Artificial Sequence: Synthetic peptide
GISPSGGMTMYADSVKG

SEQ ID NO: 939 - protein, 17 aa, Artificial Sequence
  Description of Artificial Sequence: Synthetic peptide
GISPSGGYTMYADSVKG

SEQ ID NO: 940 - protein, 17 aa, Artificial Sequence
  Description of Artificial Sequence: Synthetic peptide
GISPSGGNTLYADSVKG

SEQ ID NO: 941 - protein, 17 aa, Artificial Sequence
  Description of Artificial Sequence: Synthetic peptide
GISPSGGSTFYADSVKG

SEQ ID NO: 942 - protein, 17 aa, Artificial Sequence
  Description of Artificial Sequence: Synthetic peptide
GIGPSGGGTLYADSVKG

SEQ ID NO: 943 - protein, 17 aa, Artificial Sequence
  Description of Artificial Sequence: Synthetic peptide
GIVSSGGETFYADSVKG

SEQ ID NO: 944 - protein, 17 aa, Artificial Sequence
  Description of Artificial Sequence: Synthetic peptide
GISPSGGTTFYADSVKG

SEQ ID NO: 945 - protein, 17 aa, Artificial Sequence
  Description of Artificial Sequence: Synthetic peptide
GISPSGGNTMYADSVKG

SEQ ID NO: 946 - protein, 17 aa, Artificial Sequence
  Description of Artificial Sequence: Synthetic peptide
GISPSGGWTFYADSVKG

SEQ ID NO: 947 - protein, 17 aa, Artificial Sequence
  Description of Artificial Sequence: Synthetic peptide
GIGPSGGPTFYADSVKG

SEQ ID NO: 948 - protein, 17 aa, Artificial Sequence
  Description of Artificial Sequence: Synthetic peptide
GISPSGGLTFYADSVKG

SEQ ID NO: 949 - protein, 17 aa, Artificial Sequence
  Description of Artificial Sequence: Synthetic peptide
GISPSGGPTMYADSVKG

SEQ ID NO: 950 - protein, 17 aa, Artificial Sequence
  Description of Artificial Sequence: Synthetic peptide
GIGPSGGLTFYADSVKG

SEQ ID NO: 951 - protein, 32 aa, Artificial Sequence
  Description of Artificial Sequence: Synthetic polypeptide
RFTISRDNSKNTLYLQMNGLRAEDTAVYYCAR

SEQ ID NO: 952 - protein, 32 aa, Artificial Sequence
  Description of Artificial Sequence: Synthetic polypeptide
RFTISRDNSKNTLYLQMNSLRAEDTAVYYCAR

SEQ ID NO: 953 - protein, 32 aa, Artificial Sequence; identical to SEQ ID NO: 951
  Description of Artificial Sequence: Synthetic polypeptide

SEQ ID NO: 954 - protein, 32 aa, Artificial Sequence; identical to SEQ ID NO: 952
  Description of Artificial Sequence: Synthetic polypeptide

SEQ ID NO: 955 - protein, 32 aa, Artificial Sequence; identical to SEQ ID NO: 458
  Description of Artificial Sequence: Synthetic polypeptide

SEQ ID NO: 956 - protein, 32 aa, Artificial Sequence; identical to SEQ ID NO: 458
  Description of Artificial Sequence: Synthetic polypeptide

SEQ ID NO: 957 - protein, 32 aa, Artificial Sequence; identical to SEQ ID NO: 458
  Description of Artificial Sequence: Synthetic polypeptide

SEQ ID NO: 958 - protein, 32 aa, Artificial Sequence; identical to SEQ ID NO: 952
  Description of Artificial Sequence: Synthetic polypeptide

SEQ ID NO: 959 - protein, 32 aa, Artificial Sequence; identical to SEQ ID NO: 458
  Description of Artificial Sequence: Synthetic polypeptide

SEQ ID NO: 960 - protein, 32 aa, Artificial Sequence; identical to SEQ ID NO: 952
  Description of Artificial Sequence: Synthetic polypeptide

SEQ ID NO: 961 - protein, 32 aa, Artificial Sequence; identical to SEQ ID NO: 952
  Description of Artificial Sequence: Synthetic polypeptide

SEQ ID NO: 962 - protein, 32 aa, Artificial Sequence; identical to SEQ ID NO: 458
  Description of Artificial Sequence: Synthetic polypeptide

SEQ ID NO: 963 - protein, 32 aa, Artificial Sequence; identical to SEQ ID NO: 952
  Description of Artificial Sequence: Synthetic polypeptide

SEQ ID NO: 964 - protein, 32 aa, Artificial Sequence; identical to SEQ ID NO: 458
  Description of Artificial Sequence: Synthetic polypeptide

SEQ ID NO: 965 - protein, 32 aa, Artificial Sequence; identical to SEQ ID NO: 952
  Description of Artificial Sequence: Synthetic polypeptide

SEQ ID NO: 966 - protein, 32 aa, Artificial Sequence; identical to SEQ ID NO: 952
  Description of Artificial Sequence: Synthetic polypeptide

SEQ ID NO: 967 - protein, 32 aa, Artificial Sequence; identical to SEQ ID NO: 952
  Description of Artificial Sequence: Synthetic polypeptide

SEQ ID NO: 968 - protein, 32 aa, Artificial Sequence; identical to SEQ ID NO: 458
  Description of Artificial Sequence: Synthetic polypeptide

SEQ ID NO: 969 - protein, 32 aa, Artificial Sequence; identical to SEQ ID NO: 952
  Description of Artificial Sequence: Synthetic polypeptide

SEQ ID NO: 970 - protein, 32 aa, Artificial Sequence; identical to SEQ ID NO: 952
  Description of Artificial Sequence: Synthetic polypeptide

SEQ ID NO: 971 - protein, 32 aa, Artificial Sequence; identical to SEQ ID NO: 952
  Description of Artificial Sequence: Synthetic polypeptide

SEQ ID NO: 972 - protein, 32 aa, Artificial Sequence; identical to SEQ ID NO: 458
  Description of Artificial Sequence: Synthetic polypeptide

SEQ ID NO: 973 - protein, 32 aa, Artificial Sequence
  Description of Artificial Sequence: Synthetic polypeptide
RFTISRDDSKNTLYLQMNSLGAEATAVYYCAR

SEQ ID NO: 974 - protein, 32 aa, Artificial Sequence; identical to SEQ ID NO: 458
  Description of Artificial Sequence: Synthetic polypeptide

SEQ ID NO: 975 - protein, 32 aa, Artificial Sequence; identical to SEQ ID NO: 952
  Description of Artificial Sequence: Synthetic polypeptide

SEQ ID NO: 976 - protein, 13 aa, Artificial Sequence
  Description of Artificial Sequence: Synthetic peptide
DIRGAYSSGLFFS

SEQ ID NO: 977 - protein, 13 aa, Artificial Sequence
  Description of Artificial Sequence: Synthetic peptide
DIRGAYSSGVFDY

SEQ ID NO: 978 - protein, 13 aa, Artificial Sequence
  Description of Artificial Sequence: Synthetic peptide
DIRGAYSSGLFFS

SEQ ID NO: 979 - protein, 13 aa, Artificial Sequence
  Description of Artificial Sequence: Synthetic peptide
DIRGAYASGLFDY

SEQ ID NO: 980 - protein, 13 aa, Artificial Sequence
  Description of Artificial Sequence: Synthetic peptide
DIRGPHSSGLFDY

SEQ ID NO: 981 - protein, 13 aa, Artificial Sequence
  Description of Artificial Sequence: Synthetic peptide
DIRGAYSSGLFDY

SEQ ID NO: 982 - protein, 13 aa, Artificial Sequence
  Description of Artificial Sequence: Synthetic peptide
DIRGAYSGGLFDY

SEQ ID NO: 983 - protein, 13 aa, Artificial Sequence
  Description of Artificial Sequence: Synthetic peptide
DIMGAYASGLFHN

SEQ ID NO: 984 - protein, 13 aa, Artificial Sequence
  Description of Artificial Sequence: Synthetic peptide
DIRGAYSSGLFDH

SEQ ID NO: 985 - protein, 13 aa, Artificial Sequence
  Description of Artificial Sequence: Synthetic peptide
DIRGAYSAGIFDY

SEQ ID NO: 986 - protein, 13 aa, Artificial Sequence
  Description of Artificial Sequence: Synthetic peptide
DIWGAYSAGHFEY

SEQ ID NO: 987 - protein, 13 aa, Artificial Sequence
  Description of Artificial Sequence: Synthetic peptide
DIRGAYSSGLFDF

SEQ ID NO: 988 - protein, 13 aa, Artificial Sequence
  Description of Artificial Sequence: Synthetic peptide
DIVGPYSAGLFDY

SEQ ID NO: 989 - protein, 13 aa, Artificial Sequence
  Description of Artificial Sequence: Synthetic peptide
DISGAYSSGLFTF

SEQ ID NO: 990 - protein, 13 aa, Artificial Sequence
  Description of Artificial Sequence: Synthetic peptide
DIRGAYSSGLFYD

SEQ ID NO: 991 - protein, 13 aa, Artificial Sequence
  Description of Artificial Sequence: Synthetic peptide
DFSGAYSAGLFAY

SEQ ID NO: 992 - protein, 13 aa, Artificial Sequence
  Description of Artificial Sequence: Synthetic peptide
DLSGEYASGLFGY

SEQ ID NO: 993 - protein, 13 aa, Artificial Sequence
  Description of Artificial Sequence: Synthetic peptide
DIRGVFLSGLFDH

SEQ ID NO: 994 - protein, 13 aa, Artificial Sequence
  Description of Artificial Sequence: Synthetic peptide
DITGAYSAGLFDL

SEQ ID NO: 995 - protein, 13 aa, Artificial Sequence
  Description of Artificial Sequence: Synthetic peptide
DIWGAYASGLFDY

SEQ ID NO: 996 - protein, 13 aa, Artificial Sequence
  Description of Artificial Sequence: Synthetic peptide
DIRGAYSSGMFDF

SEQ ID NO: 997 - protein, 13 aa, Artificial Sequence
  Description of Artificial Sequence: Synthetic peptide
DIRGAYSGGLFDY

SEQ ID NO: 998 - protein, 13 aa, Artificial Sequence
  Description of Artificial Sequence: Synthetic peptide
DIRGAYSSGHFDY

SEQ ID NO: 999 - protein, 13 aa, Artificial Sequence
  Description of Artificial Sequence: Synthetic peptide
DIRGPYSSGLFDY

SEQ ID NO: 1000 - protein, 13 aa, Artificial Sequence
  Description of Artificial Sequence: Synthetic peptide
DMRGAYASGLFDY

SEQ ID NO: 1001 - protein, 11 aa, Artificial Sequence
  Description of Artificial Sequence: Synthetic peptide
WGRGTLVTVSS

SEQ ID NO: 1002 - protein, 11 aa, Artificial Sequence
  Description of Artificial Sequence: Synthetic peptide
WGRGTLVTVSS

SEQ ID NO: 1003 - protein, 11 aa, Artificial Sequence
  Description of Artificial Sequence: Synthetic peptide
WGRGTLVTVSS

SEQ ID NO: 1004 - protein, 11 aa, Artificial Sequence
  Description of Artificial Sequence: Synthetic peptide
WGRGTLVTVSS

SEQ ID NO: 1005 - protein, 11 aa, Artificial Sequence
  Description of Artificial Sequence: Synthetic peptide
WGRGTLVTVSS

SEQ ID NO: 1006 - protein, 11 aa, Artificial Sequence
  Description of Artificial Sequence: Synthetic peptide
WGRGTLVTVSS

SEQ ID NO: 1007 - protein, 11 aa, Artificial Sequence
  Description of Artificial Sequence: Synthetic peptide
WGRGTLVTVSS

SEQ ID NO: 1008 - protein, 11 aa, Artificial Sequence
  Description of Artificial Sequence: Synthetic peptide
WGRGTLVTVSS

SEQ ID NO: 1009 - protein, 11 aa, Artificial Sequence
  Description of Artificial Sequence: Synthetic peptide
WGRGTLVTVSS

SEQ ID NO: 1010 - protein, 11 aa, Artificial Sequence
  Description of Artificial Sequence: Synthetic peptide
WGRGTLVTVSS

SEQ ID NO: 1011 - protein, 11 aa, Artificial Sequence
  Description of Artificial Sequence: Synthetic peptide
WGRGTLVTVSS

SEQ ID NO: 1012 - protein, 11 aa, Artificial Sequence
  Description of Artificial Sequence: Synthetic peptide
WGRGTLVTVSS

SEQ ID NO: 1013 - protein, 11 aa, Artificial Sequence
  Description of Artificial Sequence: Synthetic peptide
WGRGTLVTVSS

SEQ ID NO: 1014 - protein, 11 aa, Artificial Sequence
  Description of Artificial Sequence: Synthetic peptide
WGRGTLVTVSS

SEQ ID NO: 1015 - protein, 11 aa, Artificial Sequence
  Description of Artificial Sequence: Synthetic peptide
WGRGTLVTVSS

SEQ ID NO: 1016 - protein, 11 aa, Artificial Sequence
  Description of Artificial Sequence: Synthetic peptide
WGRGTLVTVSS

SEQ ID NO: 1017 - protein, 11 aa, Artificial Sequence
  Description of Artificial Sequence: Synthetic peptide
WGRGTLVTVSS

SEQ ID NO: 1018 - protein, 11 aa, Artificial Sequence
  Description of Artificial Sequence: Synthetic peptide
WGRGTLVTVSS

SEQ ID NO: 1019 - protein, 11 aa, Artificial Sequence
  Description of Artificial Sequence: Synthetic peptide
WGRGTLVTVSS

SEQ ID NO: 1020 - protein, 11 aa, Artificial Sequence
  Description of Artificial Sequence: Synthetic peptide
WGRGTLVTVSS

SEQ ID NO: 1021 - protein, 11 aa, Artificial Sequence
  Description of Artificial Sequence: Synthetic peptide
WGRGTLVTVSS

SEQ ID NO: 1022 - protein, 11 aa, Artificial Sequence
  Description of Artificial Sequence: Synthetic peptide
WGRGTLVTVSS

SEQ ID NO: 1023 - protein, 11 aa, Artificial Sequence
  Description of Artificial Sequence: Synthetic peptide
WGRGTLVTVSS

SEQ ID NO: 1024 - protein, 11 aa, Artificial Sequence
  Description of Artificial Sequence: Synthetic peptide
WGRGTLVTVSS

SEQ ID NO: 1025 - protein, 11 aa, Artificial Sequence
  Description of Artificial Sequence: Synthetic peptide
WGRGTLVTVSS

SEQ ID NO: 1026 - protein, 104 aa, Artificial Sequence; identical to SEQ ID NO: 608
  Description of Artificial Sequence: Synthetic polypeptide

SEQ ID NO: 1027 - protein, 104 aa, Artificial Sequence; identical to SEQ ID NO: 608
  Description of Artificial Sequence: Synthetic polypeptide

SEQ ID NO: 1028 - protein, 104 aa, Artificial Sequence; identical to SEQ ID NO: 608
  Description of Artificial Sequence: Synthetic polypeptide

SEQ ID NO: 1029 - protein, 104 aa, Artificial Sequence; identical to SEQ ID NO: 608
  Description of Artificial Sequence: Synthetic polypeptide

SEQ ID NO: 1030 - protein, 104 aa, Artificial Sequence; identical to SEQ ID NO: 608
  Description of Artificial Sequence: Synthetic polypeptide

SEQ ID NO: 1031 - protein, 104 aa, Artificial Sequence; identical to SEQ ID NO: 608
  Description of Artificial Sequence: Synthetic polypeptide

SEQ ID NO: 1032 - protein, 104 aa, Artificial Sequence; identical to SEQ ID NO: 608
  Description of Artificial Sequence: Synthetic polypeptide

SEQ ID NO: 1033 - protein, 104 aa, Artificial Sequence; identical to SEQ ID NO: 608
  Description of Artificial Sequence: Synthetic polypeptide

SEQ ID NO: 1034 - protein, 104 aa, Artificial Sequence; identical to SEQ ID NO: 608
  Description of Artificial Sequence: Synthetic polypeptide

SEQ ID NO: 1035 - protein, 104 aa, Artificial Sequence; identical to SEQ ID NO: 608
  Description of Artificial Sequence: Synthetic polypeptide

SEQ ID NO: 1036 - protein, 104 aa, Artificial Sequence; identical to SEQ ID NO: 608
  Description of Artificial Sequence: Synthetic polypeptide

SEQ ID NO: 1037 - protein, 104 aa, Artificial Sequence; identical to SEQ ID NO: 608
  Description of Artificial Sequence: Synthetic polypeptide

SEQ ID NO: 1038 - protein, 104 aa, Artificial Sequence; identical to SEQ ID NO: 608
  Description of Artificial Sequence: Synthetic polypeptide

SEQ ID NO: 1039 - protein, 104 aa, Artificial Sequence; identical to SEQ ID NO: 608
  Description of Artificial Sequence: Synthetic polypeptide

SEQ ID NO: 1040 - protein, 104 aa, Artificial Sequence; identical to SEQ ID NO: 608
  Description of Artificial Sequence: Synthetic polypeptide

SEQ ID NO: 1041 - protein, 104 aa, Artificial Sequence; identical to SEQ ID NO: 608
  Description of Artificial Sequence: Synthetic polypeptide

SEQ ID NO: 1042 - protein, 104 aa, Artificial Sequence; identical to SEQ ID NO: 608
  Description of Artificial Sequence: Synthetic polypeptide

SEQ ID NO: 1043 - protein, 104 aa, Artificial Sequence; identical to SEQ ID NO: 608
  Description of Artificial Sequence: Synthetic polypeptide

SEQ ID NO: 1044 - protein, 104 aa, Artificial Sequence; identical to SEQ ID NO: 608
  Description of Artificial Sequence: Synthetic polypeptide

SEQ ID NO: 1045 - protein, 104 aa, Artificial Sequence; identical to SEQ ID NO: 608
  Description of Artificial Sequence: Synthetic polypeptide

SEQ ID NO: 1046 - protein, 104 aa, Artificial Sequence; identical to SEQ ID NO: 608
  Description of Artificial Sequence: Synthetic polypeptide

SEQ ID NO: 1047 - protein, 104 aa, Artificial Sequence; identical to SEQ ID NO: 608
  Description of Artificial Sequence: Synthetic polypeptide

SEQ ID NO: 1048 - protein, 104 aa, Artificial Sequence; identical to SEQ ID NO: 608
  Description of Artificial Sequence: Synthetic polypeptide

SEQ ID NO: 1049 - protein, 104 aa, Artificial Sequence; identical to SEQ ID NO: 608
  Description of Artificial Sequence: Synthetic polypeptide

SEQ ID NO: 1050 - protein, 122 aa, Artificial Sequence
  Description of Artificial Sequence: Synthetic polypeptide
EVQLLESGGGLVQPGGSLRLSCAASGFTFSPYWMHWVRQAPGKGLEWVSGISSSGGDTLYADSVKGRFTISRDNSKNTLYLQMNGLRAEDTAVYYCARDIRGAYSSGLFFSWGRGTLVTVSS

SEQ ID NO: 1051 - protein, 122 aa, Artificial Sequence
  Description of Artificial Sequence: Synthetic polypeptide
EVQLLESGGGLVQPGGSLRLSCAASGFTFSQYFMHWVRQAPGKGLEWVSGIYPSGGDTFYADSVKGRFTISRDNSKNTLYLQMNSLRAEDTAVYYCARDIRGAYSSGVFDYWGRGTLVTVSS

SEQ ID NO: 1052 - protein, 122 aa, Artificial Sequence; identical to SEQ ID NO: 1050
  Description of Artificial Sequence: Synthetic polypeptide

SEQ ID NO: 1053 - protein, 122 aa, Artificial Sequence
  Description of Artificial Sequence: Synthetic polypeptide
EVQLLESGGGLVQPGGSLRLSCAASGFTFSDYNMHWVRQAPGKGLEWVSYIGPSGGYTHYADSVKGRFTISRDNSKNTLYLQMNSLRAEDTAVYYCARDIRGAYASGLFDYWGRGTLVTVSS

SEQ ID NO: 1054 - protein, 122 aa, Artificial Sequence
  Description of Artificial Sequence: Synthetic polypeptide
EVQLLESGGGLVQPGGSLRLSCAASGFTFSWYWMHWVRQAPGKGLEWVSGIYSSGGDTIYADSVKGRFTISRDNSKNTLYLQMNSLRAEDTAVYYCAKDIRGPHSSGLFDYWGRGTLVTVSS

SEQ ID NO: 1055 - protein, 122 aa, Artificial Sequence
  Description of Artificial Sequence: Synthetic polypeptide
EVQLLESGGGLVQPGGSLRLSCAASGFTFSEYNMHWVRQAPGKGLEWVSGIVPSGGLTHYADSVKGRFTISRDNSKNTLYLQMNSLRAEDTAVYYCAKDIRGAYSSGLFDYWGRGTLVTVSS

SEQ ID NO: 1056 - protein, 122 aa, Artificial Sequence
  Description of Artificial Sequence: Synthetic polypeptide
EVQLLESGGGLVQPGGSLRLSCAASGFTFSEYNMHWVRQAPGKGLEWVSGIGPSGGPTMYADSVKGRFTISRDNSKNTLYLQMNSLRAEDTAVYYCAKDIRGAYSGGLFDYWGRGTLVTVSS

SEQ ID NO: 1057 - protein, 122 aa, Artificial Sequence
  Description of Artificial Sequence: Synthetic polypeptide
EVQLLESGGGLVQPGGSLRLSCAASGFTFSPYWMHWVRQAPGKGLEWVSGIGPSGGPTFYADSVKGRFTISRDNSKNTLYLQMNSLRAEDTAVYYCARDIMGAYASGLFHNWGRGTLVTVSS

SEQ ID NO: 1058 - protein, 122 aa, Artificial Sequence
  Description of Artificial Sequence: Synthetic polypeptide
EVQLLESGGGLVQPGGSLRLSCAASGFTFSEYNMHWVRQAPGKGLEWVSGIVPSGGLTHYADSVKGRFTISRDNSKNTLYLQMNSLRAEDTAVYYCAKDIRGAYSSGLFDHWGRGTLVTVSS

SEQ ID NO: 1059 - protein, 122 aa, Artificial Sequence
  Description of Artificial Sequence: Synthetic polypeptide
EVQLLESGGGLVQPGGSLRLSCAASGFTFSEYNMHWVRQAPGKGLEWVSGIVPSGGLTHYADSVKGRFTISRDNSKNTLYLQMNSLRAEDTAVYYCARDIRGAYSAGIFDYWGRGTLVTVSS

SEQ ID NO: 1060 - protein, 122 aa, Artificial Sequence
  Description of Artificial Sequence: Synthetic polypeptide
EVQLLESGGGLVQPGGSLRLSCAASGFTFSPYWMHWVRQAPGKGLEWVSGISPSGGETIYADSVKGRFTISRDNSKNTLYLQMNSLRAEDTAVYYCARDIWGAYSAGHFEYWGRGTLVTVSS

SEQ ID NO: 1061 - protein, 122 aa, Artificial Sequence
  Description of Artificial Sequence: Synthetic polypeptide
EVQLLESGGGLVQPGGSLRLSCAASGFTFSPYWMHWVRQAPGKGLEWVSGISPSGGHTMYADSVKGRFTISRDNSKNTLYLQMNSLRAEDTAVYYCAKDIRGAYSSGLFDFWGRGTLVTVSS

SEQ ID NO: 1062 - protein, 122 aa, Artificial Sequence
  Description of Artificial Sequence: Synthetic polypeptide
EVQLLESGGGLVQPGGSLRLSCAASGFTFSWYWMHWVRQAPGKGLEWVSGISPSGGMTMYADSVKGRFTISRDNSKNTLYLQMNSLRAEDTAVYYCARDIVGPYSAGLFDYWGRGTLVTVSS

SEQ ID NO: 1063 - protein, 122 aa, Artificial Sequence
  Description of Artificial Sequence: Synthetic polypeptide
EVQLLESGGGLVQPGGSLRLSCAASGFTFSWYWMHWVRQAPGKGLEWVSGISPSGGYTMYADSVKGRFTISRDNSKNTLYLQMNSLRAEDTAVYYCAKDISGAYSSGLFTFWGRGTLVTVSS

SEQ ID NO: 1064 - protein, 122 aa, Artificial Sequence
  Description of Artificial Sequence: Synthetic polypeptide
EVQLLESGGGLVQPGGSLRLSCAASGFTFSPYWMHWVRQAPGKGLEWVSGISPSGGNTLYADSVKGRFTISRDNSKNTLYLQMNSLRAEDTAVYYCARDIRGAYSSGLFYDWGRGTLVTVSS

SEQ ID NO: 1065 - protein, 122 aa, Artificial Sequence
  Description of Artificial Sequence: Synthetic polypeptide
EVQLLESGGGLVQPGGSLRLSCAASGFTFSWYWMHWVRQAPGKGLEWVSGISPSGGSTFYADSVKGRFTISRDNSKNTLYLQMNSLRAEDTAVYYCARDFSGAYSAGLFAYWGRGTLVTVSS

SEQ ID NO: 1066 - protein, 122 aa, Artificial Sequence
  Description of Artificial Sequence: Synthetic polypeptide
EVQLLESGGGLVQPGGSLRLSCAASGFTFSYYNMHWVRQAPGKGLEWVSGIGPSGGGTLYADSVKGRFTISRDNSKNTLYLQMNSLRAEDTAVYYCARDLSGEYASGLFGYWGRGTLVTVSS

SEQ ID NO: 1067 - protein, 122 aa, Artificial Sequence
  Description of Artificial Sequence: Synthetic polypeptide
EVQLLESGGGLVQPGGSLRLSCAASGFTFSWYGMHWVRQAPGKGLEWVSGIVSSGGETFYADSVKGRFTISRDNSKNTLYLQMNSLRAEDTAVYYCAKDIRGVFLSGLFDHWGRGTLVTVSS

SEQ ID NO: 1068 - protein, 122 aa, Artificial Sequence
  Description of Artificial Sequence: Synthetic polypeptide
EVQLLESGGGLVQPGGSLRLSCAASGFTFSYYNMHWVRQAPGKGLEWVSGISPSGGTTFYADSVKGRFTISRDNSKNTLYLQMNSLRAEDTAVYYCARDITGAYSAGLFDLWGRGTLVTVSS

SEQ ID NO: 1069 - protein, 122 aa, Artificial Sequence
  Description of Artificial Sequence: Synthetic polypeptide
EVQLLESGGGLVQPGGSLRLSCAASGFTFSPYNMHWVRQAPGKGLEWVSGISPSGGNTMYADSVKGRFTISRDNSKNTLYLQMNSLRAEDTAVYYCARDIWGAYASGLFDYWGRGTLVTVSS

SEQ ID NO: 1070 - protein, 122 aa, Artificial Sequence
  Description of Artificial Sequence: Synthetic polypeptide
EVQLLESGGGLVQPGGSLRLSCAASGFTFSPYWMHWVRQAPGKGLEWVSGISPSGGWTFYADSVKGRFTISRDNSKNTLYLQMNSLRAEDTAVYYCARDIRGAYSSGMFDFWGRGTLVTVSS

SEQ ID NO: 1071 - protein, 122 aa, Artificial Sequence
  Description of Artificial Sequence: Synthetic polypeptide
EVQLLESGGGLVQPGGSLRLSCAASGFTFSPYWMHWVRQAPGKGLEWVSGIGPSGGPTFYADSVKGRFTISRDNSKNTLYLQMNSLRAEDTAVYYCAKDIRGAYSGGLFDYWGRGTLVTVSS

SEQ ID NO: 1072 - protein, 122 aa, Artificial Sequence
  Description of Artificial Sequence: Synthetic polypeptide
EVQLLESGGGLVQPGGSLRLSCAASGFTFSAYWMHWVRQAPGKGLEWVSGISPSGGLTFYADSVKGRFTISRDDSKNTLYLQMNSLGAEATAVYYCARDIRGAYSSGHFDYWGRGTLVTVSS

SEQ ID NO: 1073 - protein, 122 aa, Artificial Sequence
  Description of Artificial Sequence: Synthetic polypeptide
EVQLLESGGGLVQPGGSLRLSCAASGFTFSWYWMHWVRQAPGKGLEWVSGISPSGGPTMYADSVKGRFTISRDNSKNTLYLQMNSLRAEDTAVYYCAKDIRGPYSSGLFDYWGRGTLVTVSS

SEQ ID NO: 1074 - protein, 122 aa, Artificial Sequence
  Description of Artificial Sequence: Synthetic polypeptide
EVQLLESGGGLVQPGGSLRLSCAASGFTFSPYWMHWVRQAPGKGLEWVSGIGPSGGLTFYADSVKGRFTISRDNSKNTLYLQMNSLRAEDTAVYYCARDMRGAYASGLFDYWGRGTLVTVSS

SEQ ID NO: 1075 - protein, 24 aa, Artificial Sequence
  Description of Artificial Sequence: Synthetic peptide
QDIQMTQSPSSLSASVGDRVTITC

SEQ ID NO: 1076 - protein, 24 aa, Artificial Sequence
  Description of Artificial Sequence: Synthetic peptide
QDIQMTQSPSSLSASVGDRVTITC

SEQ ID NO: 1077 - protein, 24 aa, Artificial Sequence
  Description of Artificial Sequence: Synthetic peptide
QDIQMTQSPSSLSASVGDRVTITC

SEQ ID NO: 1078 - protein, 24 aa, Artificial Sequence
  Description of Artificial Sequence: Synthetic peptide
QDIQMTQSPSSLSASVGDRVTITC

SEQ ID NO: 1079 - protein, 24 aa, Artificial Sequence
  Description of Artificial Sequence: Synthetic peptide
QDIQMTQSPSSLSASVGDRVTITC

SEQ ID NO: 1080 - protein, 11 aa, Artificial Sequence
  Description of Artificial Sequence: Synthetic peptide
RASQNIFNYLN

SEQ ID NO: 1081 - protein, 11 aa, Artificial Sequence
  Description of Artificial Sequence: Synthetic peptide
RADQSIYTYLN

SEQ ID NO: 1082 - protein, 11 aa, Artificial Sequence
  Description of Artificial Sequence: Synthetic peptide
RAEQSIYTYLN

SEQ ID NO: 1083 - protein, 11 aa, Artificial Sequence
  Description of Artificial Sequence: Synthetic peptide
RATQSIYTYLN

SEQ ID NO: 1084 - protein, 11 aa, Artificial Sequence
  Description of Artificial Sequence: Synthetic peptide
RAVQSIYTYLN

SEQ ID NO: 1085 - protein, 15 aa, Artificial Sequence
  Description of Artificial Sequence: Synthetic peptide
WYQQRPGKAPKLLIY

SEQ ID NO: 1086 - protein, 15 aa, Artificial Sequence
  Description of Artificial Sequence: Synthetic peptide
WYQQKPGKAPKLLIY

SEQ ID NO: 1087 - protein, 15 aa, Artificial Sequence
  Description of Artificial Sequence: Synthetic peptide
WYQQKPGKAPKLLIY

SEQ ID NO: 1088 - protein, 15 aa, Artificial Sequence
  Description of Artificial Sequence: Synthetic peptide
WYQQKPGKAPKLLIY

SEQ ID NO: 1089 - protein, 15 aa, Artificial Sequence
  Description of Artificial Sequence: Synthetic peptide
WYQQKPGKAPKLLIY

SEQ ID NO: 1090 - protein, 7 aa, Artificial Sequence
  Description of Artificial Sequence: Synthetic peptide
AASNLQT

SEQ ID NO: 1091 - protein, 7 aa, Artificial Sequence
  Description of Artificial Sequence: Synthetic peptide
AASSLQS

SEQ ID NO: 1092 - protein, 7 aa, Artificial Sequence
  Description of Artificial Sequence: Synthetic peptide
AASSLQS

SEQ ID NO: 1093 - protein, 7 aa, Artificial Sequence
  Description of Artificial Sequence: Synthetic peptide
AASSLQS

SEQ ID NO: 1094 - protein, 7 aa, Artificial Sequence
  Description of Artificial Sequence: Synthetic peptide
AASSLQS

SEQ ID NO: 1095 - protein, 32 aa, Artificial Sequence
  Description of Artificial Sequence: Synthetic polypeptide
GVPSRFSGSGSGTDFIFTISSLQPEDIATYYC

SEQ ID NO: 1096 - protein, 32 aa, Artificial Sequence; identical to SEQ ID NO: 186
  Description of Artificial Sequence: Synthetic polypeptide

SEQ ID NO: 1097 - protein, 32 aa, Artificial Sequence; identical to SEQ ID NO: 186
  Description of Artificial Sequence: Synthetic polypeptide

SEQ ID NO: 1098 - protein, 32 aa, Artificial Sequence; identical to SEQ ID NO: 186
  Description of Artificial Sequence: Synthetic polypeptide

SEQ ID NO: 1099 - protein, 32 aa, Artificial Sequence; identical to SEQ ID NO: 186
  Description of Artificial Sequence: Synthetic polypeptide

SEQ ID NO: 1100 - protein, 5 aa, Artificial Sequence
  Description of Artificial Sequence: Synthetic peptide
QQAGI

SEQ ID NO: 1101 - protein, 5 aa, Artificial Sequence
  Description of Artificial Sequence: Synthetic peptide
QQAGI

SEQ ID NO: 1102 - protein, 5 aa, Artificial Sequence
  Description of Artificial Sequence: Synthetic peptide
QQAGI

SEQ ID NO: 1103 - protein, 5 aa, Artificial Sequence
  Description of Artificial Sequence: Synthetic peptide
QQAGI

SEQ ID NO: 1104 - protein, 5 aa, Artificial Sequence
  Description of Artificial Sequence: Synthetic peptide
QQAGI

SEQ ID NO: 1105 - protein, 10 aa, Artificial Sequence
  Description of Artificial Sequence: Synthetic peptide
FGQGTKLEIK

SEQ ID NO: 1106 - protein, 10 aa, Artificial Sequence
  Description of Artificial Sequence: Synthetic peptide
FGQGTKLEIK

SEQ ID NO: 1107 - protein, 10 aa, Artificial Sequence
  Description of Artificial Sequence: Synthetic peptide
FGQGTKLEIK

SEQ ID NO: 1108 - protein, 10 aa, Artificial Sequence
  Description of Artificial Sequence: Synthetic peptide
FGQGTKLEIK

SEQ ID NO: 1109 - protein, 10 aa, Artificial Sequence
  Description of Artificial Sequence: Synthetic peptide
FGQGTKLEIK

SEQ ID NO: 1110 - protein, 7 aa, Artificial Sequence
  Description of Artificial Sequence: Synthetic peptide
RTVAAPS

SEQ ID NO: 1111 - protein, 7 aa, Artificial Sequence
  Description of Artificial Sequence: Synthetic peptide
RTVAAPS

SEQ ID NO: 1112 - protein, 7 aa, Artificial Sequence
  Description of Artificial Sequence: Synthetic peptide
RTVAAPS

SEQ ID NO: 1113 - protein, 7 aa, Artificial Sequence
  Description of Artificial Sequence: Synthetic peptide
RTVAAPS

SEQ ID NO: 1114 - protein, 7 aa, Artificial Sequence
  Description of Artificial Sequence: Synthetic peptide
RTVAAPS

SEQ ID NO: 1115 - protein, 30 aa, Artificial Sequence; identical to SEQ ID NO: 322
  Description of Artificial Sequence: Synthetic polypeptide

SEQ ID NO: 1116 - protein, 30 aa, Artificial Sequence; identical to SEQ ID NO: 322
  Description of Artificial Sequence: Synthetic polypeptide

SEQ ID NO: 1117 - protein, 30 aa, Artificial Sequence; identical to SEQ ID NO: 322
  Description of Artificial Sequence: Synthetic polypeptide

SEQ ID NO: 1118 - protein, 30 aa, Artificial Sequence; identical to SEQ ID NO: 322
  Description of Artificial Sequence: Synthetic polypeptide

SEQ ID NO: 1119 - protein, 30 aa, Artificial Sequence; identical to SEQ ID NO: 322
  Description of Artificial Sequence: Synthetic polypeptide

SEQ ID NO: 1120 - protein, 5 aa, Artificial Sequence
  Description of Artificial Sequence: Synthetic peptide
WYWMH

SEQ ID NO: 1121 - protein, 5 aa, Artificial Sequence
  Description of Artificial Sequence: Synthetic peptide
WYWMH

SEQ ID NO: 1122 - protein, 5 aa, Artificial Sequence
  Description of Artificial Sequence: Synthetic peptide
WYWMH

SEQ ID NO: 1123 - protein, 5 aa, Artificial Sequence
  Description of Artificial Sequence: Synthetic peptide
WYWMH

SEQ ID NO: 1124 - protein, 5 aa, Artificial Sequence
  Description of Artificial Sequence: Synthetic peptide
WYWMH

SEQ ID NO: 1125 - protein, 14 aa, Artificial Sequence
  Description of Artificial Sequence: Synthetic peptide
WVRQAPGKGLEWVS

SEQ ID NO: 1126 - protein, 14 aa, Artificial Sequence
  Description of Artificial Sequence: Synthetic peptide
WVRQAPGKGLEWVS

SEQ ID NO: 1127 - protein, 14 aa, Artificial Sequence
  Description of Artificial Sequence: Synthetic peptide
WVRQAPGKGLEWVS

SEQ ID NO: 1128 - protein, 14 aa, Artificial Sequence
  Description of Artificial Sequence: Synthetic peptide
WVRQAPGKGLEWVS

SEQ ID NO: 1129 - protein, 14 aa, Artificial Sequence
  Description of Artificial Sequence: Synthetic peptide
WVRQAPGKGLEWVS

SEQ ID NO: 1130 - protein, 17 aa, Artificial Sequence
  Description of Artificial Sequence: Synthetic peptide
GISPSGGMTMYADSVKG

SEQ ID NO: 1131 - protein, 17 aa, Artificial Sequence
  Description of Artificial Sequence: Synthetic peptide
GISPSGGMTMYADSVKG

SEQ ID NO: 1132 - protein, 17 aa, Artificial Sequence
  Description of Artificial Sequence: Synthetic peptide
GISPSGGMTMYADSVKG

SEQ ID NO: 1133 - protein, 17 aa, Artificial Sequence
  Description of Artificial Sequence: Synthetic peptide
GISPSGGMTMYADSVKG

SEQ ID NO: 1134 - protein, 17 aa, Artificial Sequence
  Description of Artificial Sequence: Synthetic peptide
GISPSGGMTMYADSVKG

SEQ ID NO: 1135 - protein, 32 aa, Artificial Sequence; identical to SEQ ID NO: 952
  Description of Artificial Sequence: Synthetic polypeptide

SEQ ID NO: 1136 - protein, 32 aa, Artificial Sequence; identical to SEQ ID NO: 952
  Description of Artificial Sequence: Synthetic polypeptide

SEQ ID NO: 1137 - protein, 32 aa, Artificial Sequence; identical to SEQ ID NO: 952
  Description of Artificial Sequence: Synthetic polypeptide

SEQ ID NO: 1138 - protein, 32 aa, Artificial Sequence; identical to SEQ ID NO: 952
  Description of Artificial Sequence: Synthetic polypeptide

SEQ ID NO: 1139 - protein, 32 aa, Artificial Sequence; identical to SEQ ID NO: 952
  Description of Artificial Sequence: Synthetic polypeptide

SEQ ID NO: 1140 - protein, 13 aa, Artificial Sequence
  Description of Artificial Sequence: Synthetic peptide
DIVGPYSAGLFDY

SEQ ID NO: 1141 - protein, 13 aa, Artificial Sequence
  Description of Artificial Sequence: Synthetic peptide
DIVGPYSAGLFDY

SEQ ID NO: 1142 - protein, 13 aa, Artificial Sequence
  Description of Artificial Sequence: Synthetic peptide
DIVGPYSAGLFDY

SEQ ID NO: 1143 - protein, 13 aa, Artificial Sequence
  Description of Artificial Sequence: Synthetic peptide
DIVGPYSAGLFDY

SEQ ID NO: 1144 - protein, 13 aa, Artificial Sequence
  Description of Artificial Sequence: Synthetic peptide
DIVGPYSAGLFDY

SEQ ID NO: 1145 - protein, 11 aa, Artificial Sequence
  Description of Artificial Sequence: Synthetic peptide
WGRGTLVTVSS

SEQ ID NO: 1146 - protein, 11 aa, Artificial Sequence
  Description of Artificial Sequence: Synthetic peptide
WGRGTLVTVSS

SEQ ID NO: 1147 - protein, 11 aa, Artificial Sequence
  Description of Artificial Sequence: Synthetic peptide
WGRGTLVTVSS

SEQ ID NO: 1148 - protein, 11 aa, Artificial Sequence
  Description of Artificial Sequence: Synthetic peptide
WGRGTLVTVSS

SEQ ID NO: 1149 - protein, 11 aa, Artificial Sequence
  Description of Artificial Sequence: Synthetic peptide
WGRGTLVTVSS

SEQ ID NO: 1150 - protein, 24 aa, Artificial Sequence
  Description of Artificial Sequence: Synthetic peptide
QDIQMTQSPSSLSASVGDRVTITC

SEQ ID NO: 1151 - protein, 24 aa, Artificial Sequence
  Description of Artificial Sequence: Synthetic peptide
QDIQMTQSPSSLSASVGDRVTITC

SEQ ID NO: 1152 - protein, 24 aa, Artificial Sequence
  Description of Artificial Sequence: Synthetic peptide
QDIQMTQSPSSLSASVGDRVTITC

SEQ ID NO: 1153 - protein, 24 aa, Artificial Sequence
  Description of Artificial Sequence: Synthetic peptide
QDIQMTQSPSSLSASVGDRVTITC

SEQ ID NO: 1154 - protein, 24 aa, Artificial Sequence
  Description of Artificial Sequence: Synthetic peptide
QDIQMTQSPSSLSASVGDRVTITC

SEQ ID NO: 1155 - protein, 24 aa, Artificial Sequence
  Description of Artificial Sequence: Synthetic peptide
QDIQMTQSPSSLSASVGDRVTITC

SEQ ID NO: 1156 - protein, 24 aa, Artificial Sequence
  Description of Artificial Sequence: Synthetic peptide
QDIQMTQSPSSLSASVGDRVTITC

SEQ ID NO: 1157 - protein, 24 aa, Artificial Sequence
  Description of Artificial Sequence: Synthetic peptide
QDIQMTQSPSSLSASVGDRVTITC

SEQ ID NO: 1158 - protein, 24 aa, Artificial Sequence
  Description of Artificial Sequence: Synthetic peptide
QDIQMTQSPSSLSASVGDRVTITC

SEQ ID NO: 1159 - protein, 24 aa, Artificial Sequence
  Description of Artificial Sequence: Synthetic peptide
QDIQMTQSPSSLSASVGDRVTITC

SEQ ID NO: 1160 - protein, 24 aa, Artificial Sequence
  Description of Artificial Sequence: Synthetic peptide
QDIQMTQSPSSLSASVGDRVTITC

SEQ ID NO: 1161 - protein, 24 aa, Artificial Sequence
  Description of Artificial Sequence: Synthetic peptide
QDIQMTQSPSSLSASVGDRVTITC

SEQ ID NO: 1162 - protein, 24 aa, Artificial Sequence
  Description of Artificial Sequence: Synthetic peptide
QDIQMTQSPSSLSASVGDRVTITC

SEQ ID NO: 1163 - protein, 24 aa, Artificial Sequence
  Description of Artificial Sequence: Synthetic peptide
QDIQMTQSPSSLSASVGDRVTITC

SEQ ID NO: 1164 - protein, 24 aa, Artificial Sequence
  Description of Artificial Sequence: Synthetic peptide
QDIQMTQSPSSLSASVGDRVTITC

SEQ ID NO: 1165 - protein, 24 aa, Artificial Sequence
  Description of Artificial Sequence: Synthetic peptide
QDIQMTQSPSSLSASVGDRVTITC

SEQ ID NO: 1166 - protein, 24 aa, Artificial Sequence
  Description of Artificial Sequence: Synthetic peptide
QDIQMTQSPSSLSASVGDRVTITC

SEQ ID NO: 1167 - protein, 24 aa, Artificial Sequence
  Description of Artificial Sequence: Synthetic peptide
QDIQMTQSPSSLSASVGDRVTITC

SEQ ID NO: 1168 - protein, 24 aa, Artificial Sequence
  Description of Artificial Sequence: Synthetic peptide
QDIQMTQSPSSLSASVGDRVTITC

SEQ ID NO: 1169 - protein, 24 aa, Artificial Sequence
  Description of Artificial Sequence: Synthetic peptide
QDIQMTQSPSSLSASVGDRVTITC

SEQ ID NO: 1170 - protein, 24 aa, Artificial Sequence
  Description of Artificial Sequence: Synthetic peptide
QDIQMTQSPSSLSASVGDRVTITC

SEQ ID NO: 1171 - protein, 24 aa, Artificial Sequence
  Description of Artificial Sequence: Synthetic peptide
QDIQMTQSPSSLSASVGDRVTITC

SEQ ID NO: 1172 - protein, 24 aa, Artificial Sequence
  Description of Artificial Sequence: Synthetic peptide
QDIQMTQSPSSLSASVGDRVTITC

SEQ ID NO: 1173 - protein, 24 aa, Artificial Sequence
  Description of Artificial Sequence: Synthetic peptide
QDIQMTQSPSSLSASVGDRVTITC

SEQ ID NO: 1174 - protein, 24 aa, Artificial Sequence
  Description of Artificial Sequence: Synthetic peptide
QDIQMTQSPSSLSASVGDRVTITC

SEQ ID NO: 1175 - protein, 24 aa, Artificial Sequence
  Description of Artificial Sequence: Synthetic peptide
QDIQMTQSPSSLSASVGDRVTITC

SEQ ID NO: 1176 - protein, 24 aa, Artificial Sequence
  Description of Artificial Sequence: Synthetic peptide
QDIQMTQSPSSLSASVGDRVTITC

SEQ ID NO: 1177 - protein, 24 aa, Artificial Sequence
  Description of Artificial Sequence: Synthetic peptide
QDIQMTQSPSSLSASVGDRVTITC

SEQ ID NO: 1178 - protein, 24 aa, Artificial Sequence
  Description of Artificial Sequence: Synthetic peptide
QDIQMTQSPSSLSASVGDRVTITC

SEQ ID NO: 1179 - protein, 24 aa, Artificial Sequence
  Description of Artificial Sequence: Synthetic peptide
QDIQMTQSPSSLSASVGDRVTITC

SEQ ID NO: 1180 - protein, 24 aa, Artificial Sequence
  Description of Artificial Sequence: Synthetic peptide
QDIQMTQSPSSLSASVGDRVTITC

SEQ ID NO: 1181 - protein, 24 aa, Artificial Sequence
  Description of Artificial Sequence: Synthetic peptide
QDIQMTQSPSSLSASVGDRVTITC

SEQ ID NO: 1182 - protein, 24 aa, Artificial Sequence
  Description of Artificial Sequence: Synthetic peptide
QDIQMTQSPSSLSASVGDRVTITC

SEQ ID NO: 1183 - protein, 24 aa, Artificial Sequence
  Description of Artificial Sequence: Synthetic peptide
QDIQMTQSPSSLSASVGDRVTITC

SEQ ID NO: 1184 - protein, 24 aa, Artificial Sequence
  Description of Artificial Sequence: Synthetic peptide
QDIQMTQSPSSLSASVGDRVTITC

SEQ ID NO: 1185 - protein, 24 aa, Artificial Sequence
  Description of Artificial Sequence: Synthetic peptide
QDIQMTQSPSSLSASVGDRVTITC

SEQ ID NO: 1186 - protein, 24 aa, Artificial Sequence
  Description of Artificial Sequence: Synthetic peptide
QDIQMTQSPSSLSASVGDRVTITC

SEQ ID NO: 1187 - protein, 24 aa, Artificial Sequence
  Description of Artificial Sequence: Synthetic peptide
QDIQMTQSPSSLSASVGDRVTITC

SEQ ID NO: 1188 - protein, 24 aa, Artificial Sequence
  Description of Artificial Sequence: Synthetic peptide
QDIQMTQSPSSLSASVGDRVTITC

SEQ ID NO: 1189 - protein, 24 aa, Artificial Sequence
  Description of Artificial Sequence: Synthetic peptide
QDIQMTQSPSSLSASVGDRVTITC

SEQ ID NO: 1190 - protein, 24 aa, Artificial Sequence
  Description of Artificial Sequence: Synthetic peptide
QDIQMTQSPSSLSASVGDRVTITC

SEQ ID NO: 1191 - protein, 24 aa, Artificial Sequence
  Description of Artificial Sequence: Synthetic peptide
QDIQMTQSPSSLSASVGDRVTITC

SEQ ID NO: 1192 - protein, 24 aa, Artificial Sequence
  Description of Artificial Sequence: Synthetic peptide
QDIQMTQSPSSLSASVGDRVTITC

SEQ ID NO: 1193 - protein, 24 aa, Artificial Sequence
  Description of Artificial Sequence: Synthetic peptide
QDIQMTQSPSSLSASVGDRVTITC

SEQ ID NO: 1194 - protein, 24 aa, Artificial Sequence
  Description of Artificial Sequence: Synthetic peptide
QDIQMTQSPSSLSASVGDRVTITC

SEQ ID NO: 1195 - protein, 11 aa, Artificial Sequence
  Description of Artificial Sequence: Synthetic peptide
RANQSIYTYLN

SEQ ID NO: 1196 - protein, 11 aa, Artificial Sequence
  Description of Artificial Sequence: Synthetic peptide
RANQSIYTYLN

SEQ ID NO: 1197 - protein, 11 aa, Artificial Sequence
  Description of Artificial Sequence: Synthetic peptide
RANQSIYTYLN

SEQ ID NO: 1198 - protein, 11 aa, Artificial Sequence
  Description of Artificial Sequence: Synthetic peptide
RANQSIYTYLN

SEQ ID NO: 1199 - protein, 11 aa, Artificial Sequence
  Description of Artificial Sequence: Synthetic peptide
RANQSIYTYLN

SEQ ID NO: 1200 - protein, 11 aa, Artificial Sequence
  Description of Artificial Sequence: Synthetic peptide
RANQSIYTYLN

SEQ ID NO: 1201 - protein, 11 aa, Artificial Sequence
  Description of Artificial Sequence: Synthetic peptide
RANQSIYTYLN

SEQ ID NO: 1202 - protein, 11 aa, Artificial Sequence
  Description of Artificial Sequence: Synthetic peptide
RANQSIYTYLN

SEQ ID NO: 1203 - protein, 11 aa, Artificial Sequence
  Description of Artificial Sequence: Synthetic peptide
RANQSIYTYLN

SEQ ID NO: 1204 - protein, 11 aa, Artificial Sequence
  Description of Artificial Sequence: Synthetic peptide
RANQSIYTYLN

SEQ ID NO: 1205 - protein, 11 aa, Artificial Sequence
  Description of Artificial Sequence: Synthetic peptide
RANQSIYTYLN

SEQ ID NO: 1206 - protein, 11 aa, Artificial Sequence
  Description of Artificial Sequence: Synthetic peptide
RANQSIYTYLN

SEQ ID NO: 1207 - protein, 11 aa, Artificial Sequence
  Description of Artificial Sequence: Synthetic peptide
RANQSIYTYLN

SEQ ID NO: 1208 - protein, 11 aa, Artificial Sequence
  Description of Artificial Sequence: Synthetic peptide
RANQSIYTYLN

SEQ ID NO: 1209 - protein, 11 aa, Artificial Sequence
  Description of Artificial Sequence: Synthetic peptide
RANQSIYTYLN

SEQ ID NO: 1210 - protein, 11 aa, Artificial Sequence
  Description of Artificial Sequence: Synthetic peptide
RANQSIYTYLN

SEQ ID NO: 1211 - protein, 11 aa, Artificial Sequence
  Description of Artificial Sequence: Synthetic peptide
RANQSIYTYLN

SEQ ID NO: 1212 - protein, 11 aa, Artificial Sequence
  Description of Artificial Sequence: Synthetic peptide
RANQSIYTYLN

SEQ ID NO: 1213 - protein, 11 aa, Artificial Sequence
  Description of Artificial Sequence: Synthetic peptide
RANQSIYTYLN

SEQ ID NO: 1214 - protein, 11 aa, Artificial Sequence
  Description of Artificial Sequence: Synthetic peptide
RANQSIYTYLN

SEQ ID NO: 1215 - protein, 11 aa, Artificial Sequence
  Description of Artificial Sequence: Synthetic peptide
RANQSIYTYLN

SEQ ID NO: 1216 - protein, 11 aa, Artificial Sequence
  Description of Artificial Sequence: Synthetic peptide
RANQSIYTYLN

SEQ ID NO: 1217 - protein, 11 aa, Artificial Sequence
  Description of Artificial Sequence: Synthetic peptide
RANQSIYTYLN

SEQ ID NO: 1218 - protein, 11 aa, Artificial Sequence
  Description of Artificial Sequence: Synthetic peptide
RANQSIYTYLN

SEQ ID NO: 1219 - protein, 11 aa, Artificial Sequence
  Description of Artificial Sequence: Synthetic peptide
RANQSIYTYLN

SEQ ID NO: 1220 - protein, 11 aa, Artificial Sequence
  Description of Artificial Sequence: Synthetic peptide
RANQSIYTYLN

SEQ ID NO: 1221 - protein, 11 aa, Artificial Sequence
  Description of Artificial Sequence: Synthetic peptide
RANQSIYTYLN

SEQ ID NO: 1222 - protein, 11 aa, Artificial Sequence
  Description of Artificial Sequence: Synthetic peptide
RANQSIYTYLN

SEQ ID NO: 1223 - protein, 11 aa, Artificial Sequence
  Description of Artificial Sequence: Synthetic peptide
RANQSIYTYLN

SEQ ID NO: 1224 - protein, 11 aa, Artificial Sequence
  Description of Artificial Sequence: Synthetic peptide
RANQSIYTYLN

SEQ ID NO: 1225 - protein, 11 aa, Artificial Sequence
  Description of Artificial Sequence: Synthetic peptide
RANQSIYTYLN

SEQ ID NO: 1226 - protein, 11 aa, Artificial Sequence
  Description of Artificial Sequence: Synthetic peptide
RANQSIYTYLN

SEQ ID NO: 1227 - protein, 11 aa, Artificial Sequence
  Description of Artificial Sequence: Synthetic peptide
RANQSIYTYLN

SEQ ID NO: 1228 - protein, 11 aa, Artificial Sequence
  Description of Artificial Sequence: Synthetic peptide
RANQSIYTYLN

SEQ ID NO: 1229 - protein, 11 aa, Artificial Sequence
  Description of Artificial Sequence: Synthetic peptide
RANQSIYTYLN

SEQ ID NO: 1230 - protein, 11 aa, Artificial Sequence
  Description of Artificial Sequence: Synthetic peptide
RANQSIYTYLN

SEQ ID NO: 1231 - protein, 11 aa, Artificial Sequence
  Description of Artificial Sequence: Synthetic peptide
RANQSIYTYLN

SEQ ID NO: 1232 - protein, 11 aa, Artificial Sequence
  Description of Artificial Sequence: Synthetic peptide
RANQSIYTYLN

SEQ ID NO: 1233 - protein, 11 aa, Artificial Sequence
  Description of Artificial Sequence: Synthetic peptide
RANQSIYTYLN

SEQ ID NO: 1234 - protein, 11 aa, Artificial Sequence
  Description of Artificial Sequence: Synthetic peptide
RANQSIYTYLN

SEQ ID NO: 1235 - protein, 11 aa, Artificial Sequence
  Description of Artificial Sequence: Synthetic peptide
RANQSIYTYLN

SEQ ID NO: 1236 - protein, 11 aa, Artificial Sequence
  Description of Artificial Sequence: Synthetic peptide
RANQSIYTYLN

SEQ ID NO: 1237 - protein, 11 aa, Artificial Sequence
  Description of Artificial Sequence: Synthetic peptide
RANQSIYTYLN

SEQ ID NO: 1238 - protein, 11 aa, Artificial Sequence
  Description of Artificial Sequence: Synthetic peptide
RANQSIYTYLN

SEQ ID NO: 1239 - protein, 11 aa, Artificial Sequence
  Description of Artificial Sequence: Synthetic peptide
RANQSIYTYLN

SEQ ID NO: 1240 - protein, 15 aa, Artificial Sequence
  Description of Artificial Sequence: Synthetic peptide
WYQQKPGKAPELLIY

SEQ ID NO: 1241 - protein, 15 aa, Artificial Sequence
  Description of Artificial Sequence: Synthetic peptide
WYQQKPGKAPELLIY

SEQ ID NO: 1242 - protein, 15 aa, Artificial Sequence
  Description of Artificial Sequence: Synthetic peptide
WYQQKPGKAPELLIY

SEQ ID NO: 1243 - protein, 15 aa, Artificial Sequence
  Description of Artificial Sequence: Synthetic peptide
WYQQKPGKAPELLIY

SEQ ID NO: 1244 - protein, 15 aa, Artificial Sequence
  Description of Artificial Sequence: Synthetic peptide
WYQQKPGKAPELLIY

SEQ ID NO: 1245 - protein, 15 aa, Artificial Sequence
  Description of Artificial Sequence: Synthetic peptide
WYQQKPGKAPELLIY

SEQ ID NO: 1246 - protein, 15 aa, Artificial Sequence
  Description of Artificial Sequence: Synthetic peptide
WYQQKPGKAPELLIY

SEQ ID NO: 1247 - protein, 15 aa, Artificial Sequence
  Description of Artificial Sequence: Synthetic peptide
WYQQKPGKAPELLIY

SEQ ID NO: 1248 - protein, 15 aa, Artificial Sequence
  Description of Artificial Sequence: Synthetic peptide
WYQQKPGKAPELLIY

SEQ ID NO: 1249 - protein, 15 aa, Artificial Sequence
  Description of Artificial Sequence: Synthetic peptide
WYQQKPGKAPELLIY

SEQ ID NO: 1250 - protein, 15 aa, Artificial Sequence
  Description of Artificial Sequence: Synthetic peptide
WYQQKPGKAPELLIY

SEQ ID NO: 1251 - protein, 15 aa, Artificial Sequence
  Description of Artificial Sequence: Synthetic peptide
WYQQKPGKAPELLIY

SEQ ID NO: 1252 - protein, 15 aa, Artificial Sequence
  Description of Artificial Sequence: Synthetic peptide
WYQQKPGKAPELLIY

SEQ ID NO: 1253 - protein, 15 aa, Artificial Sequence
  Description of Artificial Sequence: Synthetic peptide
WYQQKPGKAPELLIY

SEQ ID NO: 1254 - protein, 15 aa, Artificial Sequence
  Description of Artificial Sequence: Synthetic peptide
WYQQKPGKAPELLIY

SEQ ID NO: 1255 - protein, 15 aa, Artificial Sequence
  Description of Artificial Sequence: Synthetic peptide
WYQQKPGKAPELLIY

SEQ ID NO: 1256 - protein, 15 aa, Artificial Sequence
  Description of Artificial Sequence: Synthetic peptide
WYQQKPGKAPELLIY

SEQ ID NO: 1257 - protein, 15 aa, Artificial Sequence
  Description of Artificial Sequence: Synthetic peptide
WYQQKPGKAPELLIY

SEQ ID NO: 1258 - protein, 15 aa, Artificial Sequence
  Description of Artificial Sequence: Synthetic peptide
WYQQKPGKAPELLIY

SEQ ID NO: 1259 - protein, 15 aa, Artificial Sequence
  Description of Artificial Sequence: Synthetic peptide
WYQQKPGKAPELLIY

SEQ ID NO: 1260 - protein, 15 aa, Artificial Sequence
  Description of Artificial Sequence: Synthetic peptide
WYQQKPGKAPELLIY

SEQ ID NO: 1261 - protein, 15 aa, Artificial Sequence
  Description of Artificial Sequence: Synthetic peptide
WYQQKPGKAPELLIY

SEQ ID NO: 1262 - protein, 15 aa, Artificial Sequence
  Description of Artificial Sequence: Synthetic peptide
WYQQKPGKAPELLIY

SEQ ID NO: 1263 - protein, 15 aa, Artificial Sequence
  Description of Artificial Sequence: Synthetic peptide
WYQQKPGKAPELLIY

SEQ ID NO: 1264 - protein, 15 aa, Artificial Sequence
  Description of Artificial Sequence: Synthetic peptide
WYQQKPGKAPELLIY

SEQ ID NO: 1265 - protein, 15 aa, Artificial Sequence
  Description of Artificial Sequence: Synthetic peptide
WYQQKPGKAPELLIY

SEQ ID NO: 1266 - protein, 15 aa, Artificial Sequence
  Description of Artificial Sequence: Synthetic peptide
WYQQKPGKAPELLIY

SEQ ID NO: 1267 - protein, 15 aa, Artificial Sequence
  Description of Artificial Sequence: Synthetic peptide
WYQQKPGKAPELLIY

SEQ ID NO: 1268 - protein, 15 aa, Artificial Sequence
  Description of Artificial Sequence: Synthetic peptide
WYQQKPGKAPELLIY

SEQ ID NO: 1269 - protein, 15 aa, Artificial Sequence
  Description of Artificial Sequence: Synthetic peptide
WYQQKPGKAPELLIY

SEQ ID NO: 1270 - protein, 15 aa, Artificial Sequence
  Description of Artificial Sequence: Synthetic peptide
WYQQKPGKAPELLIY

SEQ ID NO: 1271 - protein, 15 aa, Artificial Sequence
  Description of Artificial Sequence: Synthetic peptide
WYQQKPGKAPELLIY

SEQ ID NO: 1272 - protein, 15 aa, Artificial Sequence
  Description of Artificial Sequence: Synthetic peptide
WYQQKPGKAPELLIY

SEQ ID NO: 1273 - protein, 15 aa, Artificial Sequence
  Description of Artificial Sequence: Synthetic peptide
WYQQKPGKAPELLIY

SEQ ID NO: 1274 - protein, 15 aa, Artificial Sequence
  Description of Artificial Sequence: Synthetic peptide
WYQQKPGKAPELLIY

SEQ ID NO: 1275 - protein, 15 aa, Artificial Sequence
  Description of Artificial Sequence: Synthetic peptide
WYQQKPGKAPELLIY

SEQ ID NO: 1276 - protein, 15 aa, Artificial Sequence
  Description of Artificial Sequence: Synthetic peptide
WYQQKPGKAPELLIY

SEQ ID NO: 1277 - protein, 15 aa, Artificial Sequence
  Description of Artificial Sequence: Synthetic peptide
WYQQKPGKAPELLIY

SEQ ID NO: 1278 - protein, 15 aa, Artificial Sequence
  Description of Artificial Sequence: Synthetic peptide
WYQQKPGKAPELLIY

SEQ ID NO: 1279 - protein, 15 aa, Artificial Sequence
  Description of Artificial Sequence: Synthetic peptide
WYQQKPGKAPELLIY

SEQ ID NO: 1280 - protein, 15 aa, Artificial Sequence
  Description of Artificial Sequence: Synthetic peptide
WYQQKPGKAPELLIY

SEQ ID NO: 1281 - protein, 15 aa, Artificial Sequence
  Description of Artificial Sequence: Synthetic peptide
WYQQKPGKAPELLIY

SEQ ID NO: 1282 - protein, 15 aa, Artificial Sequence
  Description of Artificial Sequence: Synthetic peptide
WYQQKPGKAPELLIY

SEQ ID NO: 1283 - protein, 15 aa, Artificial Sequence
  Description of Artificial Sequence: Synthetic peptide
WYQQKPGKAPELLIY

SEQ ID NO: 1284 - protein, 15 aa, Artificial Sequence
  Description of Artificial Sequence: Synthetic peptide
WYQQKPGKAPELLIY

SEQ ID NO: 1285 - protein, 7 aa, Artificial Sequence
  Description of Artificial Sequence: Synthetic peptide
AASSLQS

SEQ ID NO: 1286 - protein, 7 aa, Artificial Sequence
  Description of Artificial Sequence: Synthetic peptide
AASSLQS

SEQ ID NO: 1287 - protein, 7 aa, Artificial Sequence
  Description of Artificial Sequence: Synthetic peptide
AASSLQS

SEQ ID NO: 1288 - protein, 7 aa, Artificial Sequence
  Description of Artificial Sequence: Synthetic peptide
AASSLQS

SEQ ID NO: 1289 - protein, 7 aa, Artificial Sequence
  Description of Artificial Sequence: Synthetic peptide
AASSLQS

SEQ ID NO: 1290 - protein, 7 aa, Artificial Sequence
  Description of Artificial Sequence: Synthetic peptide
AASSLQS

SEQ ID NO: 1291 - protein, 7 aa, Artificial Sequence
  Description of Artificial Sequence: Synthetic peptide
AASSLQS

SEQ ID NO: 1292 - protein, 7 aa, Artificial Sequence
  Description of Artificial Sequence: Synthetic peptide
AASSLQS

SEQ ID NO: 1293 - protein, 7 aa, Artificial Sequence
  Description of Artificial Sequence: Synthetic peptide
AASSLQS

SEQ ID NO: 1294 - protein, 7 aa, Artificial Sequence
  Description of Artificial Sequence: Synthetic peptide
AASSLQS

SEQ ID NO: 1295 - protein, 7 aa, Artificial Sequence
  Description of Artificial Sequence: Synthetic peptide
AASSLQS

SEQ ID NO: 1296 - protein, 7 aa, Artificial Sequence
  Description of Artificial Sequence: Synthetic peptide
AASSLQS

SEQ ID NO: 1297 - protein, 7 aa, Artificial Sequence
  Description of Artificial Sequence: Synthetic peptide
AASSLQS

SEQ ID NO: 1298 - protein, 7 aa, Artificial Sequence
  Description of Artificial Sequence: Synthetic peptide
AASSLQS

SEQ ID NO: 1299 - protein, 7 aa, Artificial Sequence
  Description of Artificial Sequence: Synthetic peptide
AASSLQS

SEQ ID NO: 1300 - protein, 7 aa, Artificial Sequence
  Description of Artificial Sequence: Synthetic peptide
AASSLQS

SEQ ID NO: 1301 - protein, 7 aa, Artificial Sequence
  Description of Artificial Sequence: Synthetic peptide
AASSLQS

SEQ ID NO: 1302 - protein, 7 aa, Artificial Sequence
  Description of Artificial Sequence: Synthetic peptide
AASSLQS

SEQ ID NO: 1303 - protein, 7 aa, Artificial Sequence
  Description of Artificial Sequence: Synthetic peptide
AASSLQS

SEQ ID NO: 1304 - protein, 7 aa, Artificial Sequence
  Description of Artificial Sequence: Synthetic peptide
AASSLQS

SEQ ID NO: 1305 - protein, 7 aa, Artificial Sequence
  Description of Artificial Sequence: Synthetic peptide
AASSLQS

SEQ ID NO: 1306 - protein, 7 aa, Artificial Sequence
  Description of Artificial Sequence: Synthetic peptide
AASSLQS

SEQ ID NO: 1307 - protein, 7 aa, Artificial Sequence
  Description of Artificial Sequence: Synthetic peptide
AASSLQS

SEQ ID NO: 1308 - protein, 7 aa, Artificial Sequence
  Description of Artificial Sequence: Synthetic peptide
AASSLQS

SEQ ID NO: 1309 - protein, 7 aa, Artificial Sequence
  Description of Artificial Sequence: Synthetic peptide
AASSLQS

SEQ ID NO: 1310 - protein, 7 aa, Artificial Sequence
  Description of Artificial Sequence: Synthetic peptide
AASSLQS

SEQ ID NO: 1311 - protein, 7 aa, Artificial Sequence
  Description of Artificial Sequence: Synthetic peptide
AASSLQS

SEQ ID NO: 1312 - protein, 7 aa, Artificial Sequence
  Description of Artificial Sequence: Synthetic peptide
AASSLQS

SEQ ID NO: 1313 - protein, 7 aa, Artificial Sequence
  Description of Artificial Sequence: Synthetic peptide
AASSLQS

SEQ ID NO: 1314 - protein, 7 aa, Artificial Sequence
  Description of Artificial Sequence: Synthetic peptide
AASSLQS

SEQ ID NO: 1315 - protein, 7 aa, Artificial Sequence
  Description of Artificial Sequence: Synthetic peptide
AASSLQS

SEQ ID NO: 1316 - protein, 7 aa, Artificial Sequence
  Description of Artificial Sequence: Synthetic peptide
AASSLQS

SEQ ID NO: 1317 - protein, 7 aa, Artificial Sequence
  Description of Artificial Sequence: Synthetic peptide
AASSLQS

SEQ ID NO: 1318 - protein, 7 aa, Artificial Sequence
  Description of Artificial Sequence: Synthetic peptide
AASSLQS

SEQ ID NO: 1319 - protein, 7 aa, Artificial Sequence
  Description of Artificial Sequence: Synthetic peptide
AASSLQS

SEQ ID NO: 1320 - protein, 7 aa, Artificial Sequence
  Description of Artificial Sequence: Synthetic peptide
AASSLQS

SEQ ID NO: 1321 - protein, 7 aa, Artificial Sequence
  Description of Artificial Sequence: Synthetic peptide
AASSLQS

SEQ ID NO: 1322 - protein, 7 aa, Artificial Sequence
  Description of Artificial Sequence: Synthetic peptide
AASSLQS

SEQ ID NO: 1323 - protein, 7 aa, Artificial Sequence
  Description of Artificial Sequence: Synthetic peptide
AASSLQS

SEQ ID NO: 1324 - protein, 7 aa, Artificial Sequence
  Description of Artificial Sequence: Synthetic peptide
AASSLQS

SEQ ID NO: 1325 - protein, 7 aa, Artificial Sequence
  Description of Artificial Sequence: Synthetic peptide
AASSLQS

SEQ ID NO: 1326 - protein, 7 aa, Artificial Sequence
  Description of Artificial Sequence: Synthetic peptide
AASSLQS

SEQ ID NO: 1327 - protein, 7 aa, Artificial Sequence
  Description of Artificial Sequence: Synthetic peptide
AASSLQS

SEQ ID NO: 1328 - protein, 7 aa, Artificial Sequence
  Description of Artificial Sequence: Synthetic peptide
AASSLQS

SEQ ID NO: 1329 - protein, 7 aa, Artificial Sequence
  Description of Artificial Sequence: Synthetic peptide
AASSLQS

SEQ ID NO: 1330 - protein, 32 aa, Artificial Sequence; identical to SEQ ID NO: 186
  Description of Artificial Sequence: Synthetic polypeptide

SEQ ID NO: 1331 - protein, 32 aa, Artificial Sequence; identical to SEQ ID NO: 186
  Description of Artificial Sequence: Synthetic polypeptide

SEQ ID NO: 1332 - protein, 32 aa, Artificial Sequence; identical to SEQ ID NO: 186
  Description of Artificial Sequence: Synthetic polypeptide

SEQ ID NO: 1333 - protein, 32 aa, Artificial Sequence; identical to SEQ ID NO: 186
  Description of Artificial Sequence: Synthetic polypeptide

SEQ ID NO: 1334 - protein, 32 aa, Artificial Sequence; identical to SEQ ID NO: 186
  Description of Artificial Sequence: Synthetic polypeptide

SEQ ID NO: 1335 - protein, 32 aa, Artificial Sequence; identical to SEQ ID NO: 186
  Description of Artificial Sequence: Synthetic polypeptide

SEQ ID NO: 1336 - protein, 32 aa, Artificial Sequence; identical to SEQ ID NO: 186
  Description of Artificial Sequence: Synthetic polypeptide

SEQ ID NO: 1337 - protein, 32 aa, Artificial Sequence; identical to SEQ ID NO: 186
  Description of Artificial Sequence: Synthetic polypeptide

SEQ ID NO: 1338 - protein, 32 aa, Artificial Sequence; identical to SEQ ID NO: 186
  Description of Artificial Sequence: Synthetic polypeptide

SEQ ID NO: 1339 - protein, 32 aa, Artificial Sequence; identical to SEQ ID NO: 186
  Description of Artificial Sequence: Synthetic polypeptide

SEQ ID NO: 1340 - protein, 32 aa, Artificial Sequence; identical to SEQ ID NO: 186
  Description of Artificial Sequence: Synthetic polypeptide

SEQ ID NO: 1341 - protein, 32 aa, Artificial Sequence; identical to SEQ ID NO: 186
  Description of Artificial Sequence: Synthetic polypeptide

SEQ ID NO: 1342 - protein, 32 aa, Artificial Sequence; identical to SEQ ID NO: 186
  Description of Artificial Sequence: Synthetic polypeptide

SEQ ID NO: 1343 - protein, 32 aa, Artificial Sequence; identical to SEQ ID NO: 186
  Description of Artificial Sequence: Synthetic polypeptide

SEQ ID NO: 1344 - protein, 32 aa, Artificial Sequence; identical to SEQ ID NO: 186
  Description of Artificial Sequence: Synthetic polypeptide

SEQ ID NO: 1345 - protein, 32 aa, Artificial Sequence; identical to SEQ ID NO: 186
  Description of Artificial Sequence: Synthetic polypeptide

SEQ ID NO: 1346 - protein, 32 aa, Artificial Sequence; identical to SEQ ID NO: 186
  Description of Artificial Sequence: Synthetic polypeptide

SEQ ID NO: 1347 - protein, 32 aa, Artificial Sequence; identical to SEQ ID NO: 186
  Description of Artificial Sequence: Synthetic polypeptide

SEQ ID NO: 1348 - protein, 32 aa, Artificial Sequence; identical to SEQ ID NO: 186
  Description of Artificial Sequence: Synthetic polypeptide

SEQ ID NO: 1349 - protein, 32 aa, Artificial Sequence; identical to SEQ ID NO: 186
  Description of Artificial Sequence: Synthetic polypeptide

SEQ ID NO: 1350 - protein, 32 aa, Artificial Sequence; identical to SEQ ID NO: 186
  Description of Artificial Sequence: Synthetic polypeptide

SEQ ID NO: 1351 - protein, 32 aa, Artificial Sequence; identical to SEQ ID NO: 186
  Description of Artificial Sequence: Synthetic polypeptide

SEQ ID NO: 1352 - protein, 32 aa, Artificial Sequence; identical to SEQ ID NO: 186
  Description of Artificial Sequence: Synthetic polypeptide

SEQ ID NO: 1353 - protein, 32 aa, Artificial Sequence; identical to SEQ ID NO: 186
  Description of Artificial Sequence: Synthetic polypeptide

SEQ ID NO: 1354 - protein, 32 aa, Artificial Sequence; identical to SEQ ID NO: 186
  Description of Artificial Sequence: Synthetic polypeptide

SEQ ID NO: 1355 - protein, 32 aa, Artificial Sequence; identical to SEQ ID NO: 186
  Description of Artificial Sequence: Synthetic polypeptide

SEQ ID NO: 1356 - protein, 32 aa, Artificial Sequence; identical to SEQ ID NO: 186
  Description of Artificial Sequence: Synthetic polypeptide

SEQ ID NO: 1357 - protein, 32 aa, Artificial Sequence; identical to SEQ ID NO: 186
  Description of Artificial Sequence: Synthetic polypeptide

SEQ ID NO: 1358 - protein, 32 aa, Artificial Sequence; identical to SEQ ID NO: 186
  Description of Artificial Sequence: Synthetic polypeptide

SEQ ID NO: 1359 - protein, 32 aa, Artificial Sequence; identical to SEQ ID NO: 186
  Description of Artificial Sequence: Synthetic polypeptide

SEQ ID NO: 1360 - protein, 32 aa, Artificial Sequence; identical to SEQ ID NO: 186
  Description of Artificial Sequence: Synthetic polypeptide

SEQ ID NO: 1361 - protein, 32 aa, Artificial Sequence; identical to SEQ ID NO: 186
  Description of Artificial Sequence: Synthetic polypeptide

SEQ ID NO: 1362 - protein, 32 aa, Artificial Sequence; identical to SEQ ID NO: 186
  Description of Artificial Sequence: Synthetic polypeptide

SEQ ID NO: 1363 - protein, 32 aa, Artificial Sequence; identical to SEQ ID NO: 186
  Description of Artificial Sequence: Synthetic polypeptide

SEQ ID NO: 1364 - protein, 32 aa, Artificial Sequence; identical to SEQ ID NO: 186
  Description of Artificial Sequence: Synthetic polypeptide

SEQ ID NO: 1365 - protein, 32 aa, Artificial Sequence; identical to SEQ ID NO: 186
  Description of Artificial Sequence: Synthetic polypeptide

SEQ ID NO: 1366 - protein, 32 aa, Artificial Sequence; identical to SEQ ID NO: 186
  Description of Artificial Sequence: Synthetic polypeptide

SEQ ID NO: 1367 - protein, 32 aa, Artificial Sequence; identical to SEQ ID NO: 186
  Description of Artificial Sequence: Synthetic polypeptide

SEQ ID NO: 1368 - protein, 32 aa, Artificial Sequence; identical to SEQ ID NO: 186
  Description of Artificial Sequence: Synthetic polypeptide

SEQ ID NO: 1369 - protein, 32 aa, Artificial Sequence; identical to SEQ ID NO: 186
  Description of Artificial Sequence: Synthetic polypeptide

SEQ ID NO: 1370 - protein, 32 aa, Artificial Sequence; identical to SEQ ID NO: 186
  Description of Artificial Sequence: Synthetic polypeptide

SEQ ID NO: 1371 - protein, 32 aa, Artificial Sequence; identical to SEQ ID NO: 186
  Description of Artificial Sequence: Synthetic polypeptide

SEQ ID NO: 1372 - protein, 32 aa, Artificial Sequence; identical to SEQ ID NO: 186
  Description of Artificial Sequence: Synthetic polypeptide

SEQ ID NO: 1373 - protein, 32 aa, Artificial Sequence; identical to SEQ ID NO: 186
  Description of Artificial Sequence: Synthetic polypeptide

SEQ ID NO: 1374 - protein, 32 aa, Artificial Sequence; identical to SEQ ID NO: 186
  Description of Artificial Sequence: Synthetic polypeptide

SEQ ID NO: 1375 - protein, 5 aa, Artificial Sequence
  Description of Artificial Sequence: Synthetic peptide
QQAGI

SEQ ID NO: 1376 - protein, 5 aa, Artificial Sequence
  Description of Artificial Sequence: Synthetic peptide
QQAGI

SEQ ID NO: 1377 - protein, 5 aa, Artificial Sequence
  Description of Artificial Sequence: Synthetic peptide
QQAGI

SEQ ID NO: 1378 - protein, 5 aa, Artificial Sequence
  Description of Artificial Sequence: Synthetic peptide
QQAGI

SEQ ID NO: 1379 - protein, 5 aa, Artificial Sequence
  Description of Artificial Sequence: Synthetic peptide
QQAGI

SEQ ID NO: 1380 - protein, 5 aa, Artificial Sequence
  Description of Artificial Sequence: Synthetic peptide
QQAGI

SEQ ID NO: 1381 - protein, 5 aa, Artificial Sequence
  Description of Artificial Sequence: Synthetic peptide
QQAGI

SEQ ID NO: 1382 - protein, 5 aa, Artificial Sequence
  Description of Artificial Sequence: Synthetic peptide
QQAGI

SEQ ID NO: 1383 - protein, 5 aa, Artificial Sequence
  Description of Artificial Sequence: Synthetic peptide
QQAGI

SEQ ID NO: 1384 - protein, 5 aa, Artificial Sequence
  Description of Artificial Sequence: Synthetic peptide
QQAGI

SEQ ID NO: 1385 - protein, 5 aa, Artificial Sequence
  Description of Artificial Sequence: Synthetic peptide
QQAGI

SEQ ID NO: 1386 - protein, 5 aa, Artificial Sequence
  Description of Artificial Sequence: Synthetic peptide
QQAGI

SEQ ID NO: 1387 - protein, 5 aa, Artificial Sequence
  Description of Artificial Sequence: Synthetic peptide
QQAGI

SEQ ID NO: 1388 - protein, 5 aa, Artificial Sequence
  Description of Artificial Sequence: Synthetic peptide
QQAGI

SEQ ID NO: 1389 - protein, 5 aa, Artificial Sequence
  Description of Artificial Sequence: Synthetic peptide
QQAGI

SEQ ID NO: 1390 - protein, 5 aa, Artificial Sequence
  Description of Artificial Sequence: Synthetic peptide
QQAGI

SEQ ID NO: 1391 - protein, 5 aa, Artificial Sequence
  Description of Artificial Sequence: Synthetic peptide
QQAGI

SEQ ID NO: 1392 - protein, 5 aa, Artificial Sequence
  Description of Artificial Sequence: Synthetic peptide
QQAGI

SEQ ID NO: 1393 - protein, 5 aa, Artificial Sequence
  Description of Artificial Sequence: Synthetic peptide
QQAGI

SEQ ID NO: 1394 - protein, 5 aa, Artificial Sequence
  Description of Artificial Sequence: Synthetic peptide
QQAGI

SEQ ID NO: 1395 - protein, 5 aa, Artificial Sequence
  Description of Artificial Sequence: Synthetic peptide
QQAGI

SEQ ID NO: 1396 - protein, 5 aa, Artificial Sequence
  Description of Artificial Sequence: Synthetic peptide
QQAGI

SEQ ID NO: 1397 - protein, 5 aa, Artificial Sequence
  Description of Artificial Sequence: Synthetic peptide
QQAGI

SEQ ID NO: 1398 - protein, 5 aa, Artificial Sequence
  Description of Artificial Sequence: Synthetic peptide
QQAGI

SEQ ID NO: 1399 - protein, 5 aa, Artificial Sequence
  Description of Artificial Sequence: Synthetic peptide
QQAGI

SEQ ID NO: 1400 - protein, 5 aa, Artificial Sequence
  Description of Artificial Sequence: Synthetic peptide
QQAGI

SEQ ID NO: 1401 - protein, 5 aa, Artificial Sequence
  Description of Artificial Sequence: Synthetic peptide
QQAGI

SEQ ID NO: 1402 - protein, 5 aa, Artificial Sequence
  Description of Artificial Sequence: Synthetic peptide
QQAGI

SEQ ID NO: 1403 - protein, 5 aa, Artificial Sequence
  Description of Artificial Sequence: Synthetic peptide
QQAGI

SEQ ID NO: 1404 - protein, 5 aa, Artificial Sequence
  Description of Artificial Sequence: Synthetic peptide
QQAGI

SEQ ID NO: 1405 - protein, 5 aa, Artificial Sequence
  Description of Artificial Sequence: Synthetic peptide
QQAGI

SEQ ID NO: 1406 - protein, 5 aa, Artificial Sequence
  Description of Artificial Sequence: Synthetic peptide
QQAGI

SEQ ID NO: 1407 - protein, 5 aa, Artificial Sequence
  Description of Artificial Sequence: Synthetic peptide
QQAGI

SEQ ID NO: 1408 - protein, 5 aa, Artificial Sequence
  Description of Artificial Sequence: Synthetic peptide
QQAGI

SEQ ID NO: 1409 - protein, 5 aa, Artificial Sequence
  Description of Artificial Sequence: Synthetic peptide
QQAGI

SEQ ID NO: 1410 - protein, 5 aa, Artificial Sequence
  Description of Artificial Sequence: Synthetic peptide
QQAGI

SEQ ID NO: 1411 - protein, 5 aa, Artificial Sequence
  Description of Artificial Sequence: Synthetic peptide
QQAGI

SEQ ID NO: 1412 - protein, 5 aa, Artificial Sequence
  Description of Artificial Sequence: Synthetic peptide
QQAGI

SEQ ID NO: 1413 - protein, 5 aa, Artificial Sequence
  Description of Artificial Sequence: Synthetic peptide
QQAGI

SEQ ID NO: 1414 - protein, 5 aa, Artificial Sequence
  Description of Artificial Sequence: Synthetic peptide
QQAGI

SEQ ID NO: 1415 - protein, 5 aa, Artificial Sequence
  Description of Artificial Sequence: Synthetic peptide
QQAGI

SEQ ID NO: 1416 - protein, 5 aa, Artificial Sequence
  Description of Artificial Sequence: Synthetic peptide
QQAGI

SEQ ID NO: 1417 - protein, 5 aa, Artificial Sequence
  Description of Artificial Sequence: Synthetic peptide
QQAGI

SEQ ID NO: 1418 - protein, 5 aa, Artificial Sequence
  Description of Artificial Sequence: Synthetic peptide
QQAGI

SEQ ID NO: 1419 - protein, 5 aa, Artificial Sequence
  Description of Artificial Sequence: Synthetic peptide
QQAGI

SEQ ID NO: 1420 - protein, 10 aa, Artificial Sequence
  Description of Artificial Sequence: Synthetic peptide
FGQGTKLEIK

SEQ ID NO: 1421 - protein, 10 aa, Artificial Sequence
  Description of Artificial Sequence: Synthetic peptide
FGQGTKLEIK

SEQ ID NO: 1422 - protein, 10 aa, Artificial Sequence
  Description of Artificial Sequence: Synthetic peptide
FGQGTKLEIK

SEQ ID NO: 1423 - protein, 10 aa, Artificial Sequence
  Description of Artificial Sequence: Synthetic peptide
FGQGTKLEIK

SEQ ID NO: 1424 - protein, 10 aa, Artificial Sequence
  Description of Artificial Sequence: Synthetic peptide
FGQGTKLEIK

SEQ ID NO: 1425 - protein, 10 aa, Artificial Sequence
  Description of Artificial Sequence: Synthetic peptide
FGQGTKLEIK

SEQ ID NO: 1426 - protein, 10 aa, Artificial Sequence
  Description of Artificial Sequence: Synthetic peptide
FGQGTKLEIK

SEQ ID NO: 1427 - protein, 10 aa, Artificial Sequence
  Description of Artificial Sequence: Synthetic peptide
FGQGTKLEIK

SEQ ID NO: 1428 - protein, 10 aa, Artificial Sequence
  Description of Artificial Sequence: Synthetic peptide
FGQGTKLEIK

SEQ ID NO: 1429 - protein, 10 aa, Artificial Sequence
  Description of Artificial Sequence: Synthetic peptide
FGQGTKLEIK

SEQ ID NO: 1430 - protein, 10 aa, Artificial Sequence
  Description of Artificial Sequence: Synthetic peptide
FGQGTKLEIK

SEQ ID NO: 1431 - protein, 10 aa, Artificial Sequence
  Description of Artificial Sequence: Synthetic peptide
FGQGTKLEIK

SEQ ID NO: 1432 - protein, 10 aa, Artificial Sequence
  Description of Artificial Sequence: Synthetic peptide
FGQGTKLEIK

SEQ ID NO: 1433 - protein, 10 aa, Artificial Sequence
  Description of Artificial Sequence: Synthetic peptide
FGQGTKLEIK

SEQ ID NO: 1434 - protein, 10 aa, Artificial Sequence
  Description of Artificial Sequence: Synthetic peptide
FGQGTKLEIK

SEQ ID NO: 1435 - protein, 10 aa, Artificial Sequence
  Description of Artificial Sequence: Synthetic peptide
FGQGTKLEIK

SEQ ID NO: 1436 - protein, 10 aa, Artificial Sequence
  Description of Artificial Sequence: Synthetic peptide
FGQGTKLEIK

SEQ ID NO: 1437 - protein, 10 aa, Artificial Sequence
  Description of Artificial Sequence: Synthetic peptide
FGQGTKLEIK

SEQ ID NO: 1438 - protein, 10 aa, Artificial Sequence
  Description of Artificial Sequence: Synthetic peptide
FGQGTKLEIK

SEQ ID NO: 1439 - protein, 10 aa, Artificial Sequence
  Description of Artificial Sequence: Synthetic peptide
FGQGTKLEIK

SEQ ID NO: 1440 - protein, 10 aa, Artificial Sequence
  Description of Artificial Sequence: Synthetic peptide
FGQGTKLEIK

SEQ ID NO: 1441 - protein, 10 aa, Artificial Sequence
  Description of Artificial Sequence: Synthetic peptide
FGQGTKLEIK

SEQ ID NO: 1442 - protein, 10 aa, Artificial Sequence
  Description of Artificial Sequence: Synthetic peptide
FGQGTKLEIK

SEQ ID NO: 1443 - protein, 10 aa, Artificial Sequence
  Description of Artificial Sequence: Synthetic peptide
FGQGTKLEIK

SEQ ID NO: 1444 - protein, 10 aa, Artificial Sequence
  Description of Artificial Sequence: Synthetic peptide
FGQGTKLEIK

SEQ ID NO: 1445 - protein, 10 aa, Artificial Sequence
  Description of Artificial Sequence: Synthetic peptide
FGQGTKLEIK

SEQ ID NO: 1446 - protein, 10 aa, Artificial Sequence
  Description of Artificial Sequence: Synthetic peptide
FGQGTKLEIK

SEQ ID NO: 1447 - protein, 10 aa, Artificial Sequence
  Description of Artificial Sequence: Synthetic peptide
FGQGTKLEIK

SEQ ID NO: 1448 - protein, 10 aa, Artificial Sequence
  Description of Artificial Sequence: Synthetic peptide
FGQGTKLEIK

SEQ ID NO: 1449 - protein, 10 aa, Artificial Sequence
  Description of Artificial Sequence: Synthetic peptide
FGQGTKLEIK

SEQ ID NO: 1450 - protein, 10 aa, Artificial Sequence
  Description of Artificial Sequence: Synthetic peptide
FGQGTKLEIK

SEQ ID NO: 1451 - protein, 10 aa, Artificial Sequence
  Description of Artificial Sequence: Synthetic peptide
FGQGTKLEIK

SEQ ID NO: 1452 - protein, 10 aa, Artificial Sequence
  Description of Artificial Sequence: Synthetic peptide
FGQGTKLEIK

SEQ ID NO: 1453 - protein, 10 aa, Artificial Sequence
  Description of Artificial Sequence: Synthetic peptide
FGQGTKLEIK

SEQ ID NO: 1454 - protein, 10 aa, Artificial Sequence
  Description of Artificial Sequence: Synthetic peptide
FGQGTKLEIK

SEQ ID NO: 1455 - protein, 10 aa, Artificial Sequence
  Description of Artificial Sequence: Synthetic peptide
FGQGTKLEIK

SEQ ID NO: 1456 - protein, 10 aa, Artificial Sequence
  Description of Artificial Sequence: Synthetic peptide
FGQGTKLEIK

SEQ ID NO: 1457 - protein, 10 aa, Artificial Sequence
  Description of Artificial Sequence: Synthetic peptide
FGQGTKLEIK

SEQ ID NO: 1458 - protein, 10 aa, Artificial Sequence
  Description of Artificial Sequence: Synthetic peptide
FGQGTKLEIK

SEQ ID NO: 1459 - protein, 10 aa, Artificial Sequence
  Description of Artificial Sequence: Synthetic peptide
FGQGTKLEIK

SEQ ID NO: 1460 - protein, 10 aa, Artificial Sequence
  Description of Artificial Sequence: Synthetic peptide
FGQGTKLEIK

SEQ ID NO: 1461 - protein, 10 aa, Artificial Sequence
  Description of Artificial Sequence: Synthetic peptide
FGQGTKLEIK

SEQ ID NO: 1462 - protein, 10 aa, Artificial Sequence
  Description of Artificial Sequence: Synthetic peptide
FGQGTKLEIK

SEQ ID NO: 1463 - protein, 10 aa, Artificial Sequence
  Description of Artificial Sequence: Synthetic peptide
FGQGTKLEIK

SEQ ID NO: 1464 - protein, 10 aa, Artificial Sequence
  Description of Artificial Sequence: Synthetic peptide
FGQGTKLEIK

SEQ ID NO: 1465 - protein, 7 aa, Artificial Sequence
  Description of Artificial Sequence: Synthetic peptide
RTVAAPS

SEQ ID NO: 1466 - protein, 7 aa, Artificial Sequence
  Description of Artificial Sequence: Synthetic peptide
RTVAAPS

SEQ ID NO: 1467 - protein, 7 aa, Artificial Sequence
  Description of Artificial Sequence: Synthetic peptide
RTVAAPS

SEQ ID NO: 1468 - protein, 7 aa, Artificial Sequence
  Description of Artificial Sequence: Synthetic peptide
RTVAAPS

SEQ ID NO: 1469 - protein, 7 aa, Artificial Sequence
  Description of Artificial Sequence: Synthetic peptide
RTVAAPS

SEQ ID NO: 1470 - protein, 7 aa, Artificial Sequence
  Description of Artificial Sequence: Synthetic peptide
RTVAAPS

SEQ ID NO: 1471 - protein, 7 aa, Artificial Sequence
  Description of Artificial Sequence: Synthetic peptide
RTVAAPS

SEQ ID NO: 1472 - protein, 7 aa, Artificial Sequence
  Description of Artificial Sequence: Synthetic peptide
RTVAAPS

SEQ ID NO: 1473 - protein, 7 aa, Artificial Sequence
  Description of Artificial Sequence: Synthetic peptide
RTVAAPS

SEQ ID NO: 1474 - protein, 7 aa, Artificial Sequence
  Description of Artificial Sequence: Synthetic peptide
RTVAAPS

SEQ ID NO: 1475 - protein, 7 aa, Artificial Sequence
  Description of Artificial Sequence: Synthetic peptide
RTVAAPS

SEQ ID NO: 1476 - protein, 7 aa, Artificial Sequence
  Description of Artificial Sequence: Synthetic peptide
RTVAAPS

SEQ ID NO: 1477 - protein, 7 aa, Artificial Sequence
  Description of Artificial Sequence: Synthetic peptide
RTVAAPS

SEQ ID NO: 1478 - protein, 7 aa, Artificial Sequence
  Description of Artificial Sequence: Synthetic peptide
RTVAAPS

SEQ ID NO: 1479 - protein, 7 aa, Artificial Sequence
  Description of Artificial Sequence: Synthetic peptide
RTVAAPS

SEQ ID NO: 1480 - protein, 7 aa, Artificial Sequence
  Description of Artificial Sequence: Synthetic peptide
RTVAAPS

SEQ ID NO: 1481 - protein, 7 aa, Artificial Sequence
  Description of Artificial Sequence: Synthetic peptide
RTVAAPS

SEQ ID NO: 1482 - protein, 7 aa, Artificial Sequence
  Description of Artificial Sequence: Synthetic peptide
RTVAAPS

SEQ ID NO: 1483 - protein, 7 aa, Artificial Sequence
  Description of Artificial Sequence: Synthetic peptide
RTVAAPS

SEQ ID NO: 1484 - protein, 7 aa, Artificial Sequence
  Description of Artificial Sequence: Synthetic peptide
RTVAAPS

SEQ ID NO: 1485 - protein, 7 aa, Artificial Sequence
  Description of Artificial Sequence: Synthetic peptide
RTVAAPS

SEQ ID NO: 1486 - protein, 7 aa, Artificial Sequence
  Description of Artificial Sequence: Synthetic peptide
RTVAAPS

SEQ ID NO: 1487 - protein, 7 aa, Artificial Sequence
  Description of Artificial Sequence: Synthetic peptide
RTVAAPS

SEQ ID NO: 1488 - protein, 7 aa, Artificial Sequence
  Description of Artificial Sequence: Synthetic peptide
RTVAAPS

SEQ ID NO: 1489 - protein, 7 aa, Artificial Sequence
  Description of Artificial Sequence: Synthetic peptide
RTVAAPS

SEQ ID NO: 1490 - protein, 7 aa, Artificial Sequence
  Description of Artificial Sequence: Synthetic peptide
RTVAAPS

SEQ ID NO: 1491 - protein, 7 aa, Artificial Sequence
  Description of Artificial Sequence: Synthetic peptide
RTVAAPS

SEQ ID NO: 1492 - protein, 7 aa, Artificial Sequence
  Description of Artificial Sequence: Synthetic peptide
RTVAAPS

SEQ ID NO: 1493 - protein, 7 aa, Artificial Sequence
  Description of Artificial Sequence: Synthetic peptide
RTVAAPS

SEQ ID NO: 1494 - protein, 7 aa, Artificial Sequence
  Description of Artificial Sequence: Synthetic peptide
RTVAAPS

SEQ ID NO: 1495 - protein, 7 aa, Artificial Sequence
  Description of Artificial Sequence: Synthetic peptide
RTVAAPS

SEQ ID NO: 1496 - protein, 7 aa, Artificial Sequence
  Description of Artificial Sequence: Synthetic peptide
RTVAAPS

SEQ ID NO: 1497 - protein, 7 aa, Artificial Sequence
  Description of Artificial Sequence: Synthetic peptide
RTVAAPS

SEQ ID NO: 1498 - protein, 7 aa, Artificial Sequence
  Description of Artificial Sequence: Synthetic peptide
RTVAAPS

SEQ ID NO: 1499 - protein, 7 aa, Artificial Sequence
  Description of Artificial Sequence: Synthetic peptide
RTVAAPS

SEQ ID NO: 1500 - protein, 7 aa, Artificial Sequence
  Description of Artificial Sequence: Synthetic peptide
RTVAAPS

SEQ ID NO: 1501 - protein, 7 aa, Artificial Sequence
  Description of Artificial Sequence: Synthetic peptide
RTVAAPS

SEQ ID NO: 1502 - protein, 7 aa, Artificial Sequence
  Description of Artificial Sequence: Synthetic peptide
RTVAAPS

SEQ ID NO: 1503 - protein, 7 aa, Artificial Sequence
  Description of Artificial Sequence: Synthetic peptide
RTVAAPS

SEQ ID NO: 1504 - protein, 7 aa, Artificial Sequence
  Description of Artificial Sequence: Synthetic peptide
RTVAAPS

SEQ ID NO: 1505 - protein, 7 aa, Artificial Sequence
  Description of Artificial Sequence: Synthetic peptide
RTVAAPS

SEQ ID NO: 1506 - protein, 7 aa, Artificial Sequence
  Description of Artificial Sequence: Synthetic peptide
RTVAAPS

SEQ ID NO: 1507 - protein, 7 aa, Artificial Sequence
  Description of Artificial Sequence: Synthetic peptide
RTVAAPS

SEQ ID NO: 1508 - protein, 7 aa, Artificial Sequence
  Description of Artificial Sequence: Synthetic peptide
RTVAAPS

SEQ ID NO: 1509 - protein, 7 aa, Artificial Sequence
  Description of Artificial Sequence: Synthetic peptide
RTVAAPS

SEQ ID NO: 1510 - protein, 30 aa, Artificial Sequence; identical to SEQ ID NO: 322
  Description of Artificial Sequence: Synthetic polypeptide

SEQ ID NO: 1511 - protein, 30 aa, Artificial Sequence; identical to SEQ ID NO: 322
  Description of Artificial Sequence: Synthetic polypeptide

SEQ ID NO: 1512 - protein, 30 aa, Artificial Sequence; identical to SEQ ID NO: 322
  Description of Artificial Sequence: Synthetic polypeptide

SEQ ID NO: 1513 - protein, 30 aa, Artificial Sequence; identical to SEQ ID NO: 322
  Description of Artificial Sequence: Synthetic polypeptide

SEQ ID NO: 1514 - protein, 30 aa, Artificial Sequence; identical to SEQ ID NO: 322
  Description of Artificial Sequence: Synthetic polypeptide

SEQ ID NO: 1515 - protein, 30 aa, Artificial Sequence; identical to SEQ ID NO: 322
  Description of Artificial Sequence: Synthetic polypeptide

SEQ ID NO: 1516 - protein, 30 aa, Artificial Sequence; identical to SEQ ID NO: 322
  Description of Artificial Sequence: Synthetic polypeptide

SEQ ID NO: 1517 - protein, 30 aa, Artificial Sequence; identical to SEQ ID NO: 322
  Description of Artificial Sequence: Synthetic polypeptide

SEQ ID NO: 1518 - protein, 30 aa, Artificial Sequence; identical to SEQ ID NO: 322
  Description of Artificial Sequence: Synthetic polypeptide

SEQ ID NO: 1519 - protein, 30 aa, Artificial Sequence; identical to SEQ ID NO: 322
  Description of Artificial Sequence: Synthetic polypeptide

SEQ ID NO: 1520 - protein, 30 aa, Artificial Sequence; identical to SEQ ID NO: 322
  Description of Artificial Sequence: Synthetic polypeptide

SEQ ID NO: 1521 - protein, 30 aa, Artificial Sequence; identical to SEQ ID NO: 322
  Description of Artificial Sequence: Synthetic polypeptide

SEQ ID NO: 1522 - protein, 30 aa, Artificial Sequence; identical to SEQ ID NO: 322
  Description of Artificial Sequence: Synthetic polypeptide

SEQ ID NO: 1523 - protein, 30 aa, Artificial Sequence; identical to SEQ ID NO: 322
  Description of Artificial Sequence: Synthetic polypeptide

SEQ ID NO: 1524 - protein, 30 aa, Artificial Sequence; identical to SEQ ID NO: 322
  Description of Artificial Sequence: Synthetic polypeptide

SEQ ID NO: 1525 - protein, 30 aa, Artificial Sequence; identical to SEQ ID NO: 322
  Description of Artificial Sequence: Synthetic polypeptide

SEQ ID NO: 1526 - protein, 30 aa, Artificial Sequence; identical to SEQ ID NO: 322
  Description of Artificial Sequence: Synthetic polypeptide

SEQ ID NO: 1527 - protein, 30 aa, Artificial Sequence; identical to SEQ ID NO: 322
  Description of Artificial Sequence: Synthetic polypeptide

SEQ ID NO: 1528 - protein, 30 aa, Artificial Sequence; identical to SEQ ID NO: 322
  Description of Artificial Sequence: Synthetic polypeptide

SEQ ID NO: 1529 - protein, 30 aa, Artificial Sequence; identical to SEQ ID NO: 322
  Description of Artificial Sequence: Synthetic polypeptide

SEQ ID NO: 1530 - protein, 30 aa, Artificial Sequence; identical to SEQ ID NO: 322
  Description of Artificial Sequence: Synthetic polypeptide

SEQ ID NO: 1531 - protein, 30 aa, Artificial Sequence; identical to SEQ ID NO: 322
  Description of Artificial Sequence: Synthetic polypeptide

SEQ ID NO: 1532 - protein, 30 aa, Artificial Sequence; identical to SEQ ID NO: 322
  Description of Artificial Sequence: Synthetic polypeptide

SEQ ID NO: 1533 - protein, 30 aa, Artificial Sequence; identical to SEQ ID NO: 322
  Description of Artificial Sequence: Synthetic polypeptide

SEQ ID NO: 1534 - protein, 30 aa, Artificial Sequence; identical to SEQ ID NO: 322
  Description of Artificial Sequence: Synthetic polypeptide

SEQ ID NO: 1535 - protein, 30 aa, Artificial Sequence; identical to SEQ ID NO: 322
  Description of Artificial Sequence: Synthetic polypeptide

SEQ ID NO: 1536 - protein, 30 aa, Artificial Sequence; identical to SEQ ID NO: 322
  Description of Artificial Sequence: Synthetic polypeptide

SEQ ID NO: 1537 - protein, 30 aa, Artificial Sequence; identical to SEQ ID NO: 322
  Description of Artificial Sequence: Synthetic polypeptide

SEQ ID NO: 1538 - protein, 30 aa, Artificial Sequence; identical to SEQ ID NO: 322
  Description of Artificial Sequence: Synthetic polypeptide

SEQ ID NO: 1539 - protein, 30 aa, Artificial Sequence; identical to SEQ ID NO: 322
  Description of Artificial Sequence: Synthetic polypeptide

SEQ ID NO: 1540 - protein, 30 aa, Artificial Sequence; identical to SEQ ID NO: 322
  Description of Artificial Sequence: Synthetic polypeptide

SEQ ID NO: 1541 - protein, 30 aa, Artificial Sequence; identical to SEQ ID NO: 322
  Description of Artificial Sequence: Synthetic polypeptide

SEQ ID NO: 1542 - protein, 30 aa, Artificial Sequence; identical to SEQ ID NO: 322
  Description of Artificial Sequence: Synthetic polypeptide

SEQ ID NO: 1543 - protein, 30 aa, Artificial Sequence; identical to SEQ ID NO: 322
  Description of Artificial Sequence: Synthetic polypeptide

SEQ ID NO: 1544 - protein, 30 aa, Artificial Sequence; identical to SEQ ID NO: 322
  Description of Artificial Sequence: Synthetic polypeptide

SEQ ID NO: 1545 - protein, 30 aa, Artificial Sequence; identical to SEQ ID NO: 322
  Description of Artificial Sequence: Synthetic polypeptide

SEQ ID NO: 1546 - protein, 30 aa, Artificial Sequence; identical to SEQ ID NO: 322
  Description of Artificial Sequence: Synthetic polypeptide

SEQ ID NO: 1547 - protein, 30 aa, Artificial Sequence; identical to SEQ ID NO: 322
  Description of Artificial Sequence: Synthetic polypeptide

SEQ ID NO: 1548 - protein, 30 aa, Artificial Sequence; identical to SEQ ID NO: 322
  Description of Artificial Sequence: Synthetic polypeptide

SEQ ID NO: 1549 - protein, 30 aa, Artificial Sequence; identical to SEQ ID NO: 322
  Description of Artificial Sequence: Synthetic polypeptide

SEQ ID NO: 1550 - protein, 30 aa, Artificial Sequence; identical to SEQ ID NO: 322
  Description of Artificial Sequence: Synthetic polypeptide

SEQ ID NO: 1551 - protein, 30 aa, Artificial Sequence; identical to SEQ ID NO: 322
  Description of Artificial Sequence: Synthetic polypeptide

SEQ ID NO: 1552 - protein, 30 aa, Artificial Sequence; identical to SEQ ID NO: 322
  Description of Artificial Sequence: Synthetic polypeptide

SEQ ID NO: 1553 - protein, 30 aa, Artificial Sequence; identical to SEQ ID NO: 322
  Description of Artificial Sequence: Synthetic polypeptide

SEQ ID NO: 1554 - protein, 30 aa, Artificial Sequence; identical to SEQ ID NO: 322
  Description of Artificial Sequence: Synthetic polypeptide

SEQ ID NO: 1555 - protein, 5 aa, Artificial Sequence
  Description of Artificial Sequence: Synthetic peptide
PYWMH

SEQ ID NO: 1556 - protein, 5 aa, Artificial Sequence
  Description of Artificial Sequence: Synthetic peptide
WYWMV

SEQ ID NO: 1557 - protein, 5 aa, Artificial Sequence
  Description of Artificial Sequence: Synthetic peptide
EYWMA

SEQ ID NO: 1558 - protein, 5 aa, Artificial Sequence
  Description of Artificial Sequence: Synthetic peptide
PYWMH

SEQ ID NO: 1559 - protein, 5 aa, Artificial Sequence
  Description of Artificial Sequence: Synthetic peptide
PYWMH

SEQ ID NO: 1560 - protein, 5 aa, Artificial Sequence
  Description of Artificial Sequence: Synthetic peptide
WYWMH

SEQ ID NO: 1561 - protein, 5 aa, Artificial Sequence
  Description of Artificial Sequence: Synthetic peptide
PYWMH

SEQ ID NO: 1562 - protein, 5 aa, Artificial Sequence
  Description of Artificial Sequence: Synthetic peptide
WYWMV

SEQ ID NO: 1563 - protein, 5 aa, Artificial Sequence
  Description of Artificial Sequence: Synthetic peptide
WYWMH

SEQ ID NO: 1564 - protein, 5 aa, Artificial Sequence
  Description of Artificial Sequence: Synthetic peptide
PYWMH

SEQ ID NO: 1565 - protein, 5 aa, Artificial Sequence
  Description of Artificial Sequence: Synthetic peptide
HYWMQ

SEQ ID NO: 1566 - protein, 5 aa, Artificial Sequence
  Description of Artificial Sequence: Synthetic peptide
WYWMG

SEQ ID NO: 1567 - protein, 5 aa, Artificial Sequence
  Description of Artificial Sequence: Synthetic peptide
PYWMH

SEQ ID NO: 1568 - protein, 5 aa, Artificial Sequence
  Description of Artificial Sequence: Synthetic peptide
EYWMT

SEQ ID NO: 1569 - protein, 5 aa, Artificial Sequence
  Description of Artificial Sequence: Synthetic peptide
WYWMH

SEQ ID NO: 1570 - protein, 5 aa, Artificial Sequence
  Description of Artificial Sequence: Synthetic peptide
PYNMH

SEQ ID NO: 1571 - protein, 5 aa, Artificial Sequence
  Description of Artificial Sequence: Synthetic peptide
WYWMG

SEQ ID NO: 1572 - protein, 5 aa, Artificial Sequence
  Description of Artificial Sequence: Synthetic peptide
EYWMT

SEQ ID NO: 1573 - protein, 5 aa, Artificial Sequence
  Description of Artificial Sequence: Synthetic peptide
WYWMV

SEQ ID NO: 1574 - protein, 5 aa, Artificial Sequence
  Description of Artificial Sequence: Synthetic peptide
WYNMS

SEQ ID NO: 1575 - protein, 5 aa, Artificial Sequence
  Description of Artificial Sequence: Synthetic peptide
EYWMT

SEQ ID NO: 1576 - protein, 5 aa, Artificial Sequence
  Description of Artificial Sequence: Synthetic peptide
WYWMV

SEQ ID NO: 1577 - protein, 5 aa, Artificial Sequence
  Description of Artificial Sequence: Synthetic peptide
WYWMV

SEQ ID NO: 1578 - protein, 5 aa, Artificial Sequence
  Description of Artificial Sequence: Synthetic peptide
WYWMH

SEQ ID NO: 1579 - protein, 5 aa, Artificial Sequence
  Description of Artificial Sequence: Synthetic peptide
AYWMH

SEQ ID NO: 1580 - protein, 5 aa, Artificial Sequence
  Description of Artificial Sequence: Synthetic peptide
WYWMV

SEQ ID NO: 1581 - protein, 5 aa, Artificial Sequence
  Description of Artificial Sequence: Synthetic peptide
WYWMH

SEQ ID NO: 1582 - protein, 5 aa, Artificial Sequence
  Description of Artificial Sequence: Synthetic peptide
WYWMH

SEQ ID NO: 1583 - protein, 5 aa, Artificial Sequence
  Description of Artificial Sequence: Synthetic peptide
PYWMS

SEQ ID NO: 1584 - protein, 5 aa, Artificial Sequence
  Description of Artificial Sequence: Synthetic peptide
YYGMG

SEQ ID NO: 1585 - protein, 5 aa, Artificial Sequence
  Description of Artificial Sequence: Synthetic peptide
WYWMH

SEQ ID NO: 1586 - protein, 5 aa, Artificial Sequence
  Description of Artificial Sequence: Synthetic peptide
WYWMG

SEQ ID NO: 1587 - protein, 5 aa, Artificial Sequence
  Description of Artificial Sequence: Synthetic peptide
PYWMH

SEQ ID NO: 1588 - protein, 5 aa, Artificial Sequence
  Description of Artificial Sequence: Synthetic peptide
WYWMH

SEQ ID NO: 1589 - protein, 5 aa, Artificial Sequence
  Description of Artificial Sequence: Synthetic peptide
PYWMH

SEQ ID NO: 1590 - protein, 5 aa, Artificial Sequence
  Description of Artificial Sequence: Synthetic peptide
EYWMA

SEQ ID NO: 1591 - protein, 5 aa, Artificial Sequence
  Description of Artificial Sequence: Synthetic peptide
WYWMV

SEQ ID NO: 1592 - protein, 5 aa, Artificial Sequence
  Description of Artificial Sequence: Synthetic peptide
PYWMH

SEQ ID NO: 1593 - protein, 5 aa, Artificial Sequence
  Description of Artificial Sequence: Synthetic peptide
HYWMQ

SEQ ID NO: 1594 - protein, 5 aa, Artificial Sequence
  Description of Artificial Sequence: Synthetic peptide
EYWMT

SEQ ID NO: 1595 - protein, 5 aa, Artificial Sequence
  Description of Artificial Sequence: Synthetic peptide
PYWMS

SEQ ID NO: 1596 - protein, 5 aa, Artificial Sequence
  Description of Artificial Sequence: Synthetic peptide
WYWMH

SEQ ID NO: 1597 - protein, 5 aa, Artificial Sequence
  Description of Artificial Sequence: Synthetic peptide
WYWMV

SEQ ID NO: 1598 - protein, 5 aa, Artificial Sequence
  Description of Artificial Sequence: Synthetic peptide
WYNMS

SEQ ID NO: 1599 - protein, 5 aa, Artificial Sequence
  Description of Artificial Sequence: Synthetic peptide
PYWMH

SEQ ID NO: 1600 - protein, 14 aa, Artificial Sequence
  Description of Artificial Sequence: Synthetic peptide
WVRQAPGKGLEWVS

SEQ ID NO: 1601 - protein, 14 aa, Artificial Sequence
  Description of Artificial Sequence: Synthetic peptide
WVRQAPGKGLEWVS

SEQ ID NO: 1602 - protein, 14 aa, Artificial Sequence
  Description of Artificial Sequence: Synthetic peptide
WVRQAPGKGLEWVS

SEQ ID NO: 1603 - protein, 14 aa, Artificial Sequence
  Description of Artificial Sequence: Synthetic peptide
WVRQAPGKGLEWVS

SEQ ID NO: 1604 - protein, 14 aa, Artificial Sequence
  Description of Artificial Sequence: Synthetic peptide
WVRQAPGKGLEWVS

SEQ ID NO: 1605 - protein, 14 aa, Artificial Sequence
  Description of Artificial Sequence: Synthetic peptide
WVRQAPGKGLEWVS

SEQ ID NO: 1606 - protein, 14 aa, Artificial Sequence
  Description of Artificial Sequence: Synthetic peptide
WVRQAPGKGLEWVS

SEQ ID NO: 1607 - protein, 14 aa, Artificial Sequence
  Description of Artificial Sequence: Synthetic peptide
WVRQAPGKGLEWVS

SEQ ID NO: 1608 - protein, 14 aa, Artificial Sequence
  Description of Artificial Sequence: Synthetic peptide
WVRQAPGKGLEWVS

SEQ ID NO: 1609 - protein, 14 aa, Artificial Sequence
  Description of Artificial Sequence: Synthetic peptide
WVRQAPGKGLEWVS

SEQ ID NO: 1610 - protein, 14 aa, Artificial Sequence
  Description of Artificial Sequence: Synthetic peptide
WVRQAPGKGLEWVS

SEQ ID NO: 1611 - protein, 14 aa, Artificial Sequence
  Description of Artificial Sequence: Synthetic peptide
WVRQAPGKGLEWVS

SEQ ID NO: 1612 - protein, 14 aa, Artificial Sequence
  Description of Artificial Sequence: Synthetic peptide
WVRQAPGKGLEWVS

SEQ ID NO: 1613 - protein, 14 aa, Artificial Sequence
  Description of Artificial Sequence: Synthetic peptide
WVRQAPGKGLEWVS

SEQ ID NO: 1614 - protein, 14 aa, Artificial Sequence
  Description of Artificial Sequence: Synthetic peptide
WVRQAPGKGLEWVS

SEQ ID NO: 1615 - protein, 14 aa, Artificial Sequence
  Description of Artificial Sequence: Synthetic peptide
WVRQAPGKGLEWVS

SEQ ID NO: 1616 - protein, 14 aa, Artificial Sequence
  Description of Artificial Sequence: Synthetic peptide
WVRQAPGKGLEWVS

SEQ ID NO: 1617 - protein, 14 aa, Artificial Sequence
  Description of Artificial Sequence: Synthetic peptide
WVRQAPGKGLEWVS

SEQ ID NO: 1618 - protein, 14 aa, Artificial Sequence
  Description of Artificial Sequence: Synthetic peptide
WVRQAPGKGLEWVS

SEQ ID NO: 1619 - protein, 14 aa, Artificial Sequence
  Description of Artificial Sequence: Synthetic peptide
WVRQAPGKGLEWVS

SEQ ID NO: 1620 - protein, 14 aa, Artificial Sequence
  Description of Artificial Sequence: Synthetic peptide
WVRQAPGKGLEWVS

SEQ ID NO: 1621 - protein, 14 aa, Artificial Sequence
  Description of Artificial Sequence: Synthetic peptide
WVRQAPGKGLEWVS

SEQ ID NO: 1622 - protein, 14 aa, Artificial Sequence
  Description of Artificial Sequence: Synthetic peptide
WVRQAPGKGLEWVS

SEQ ID NO: 1623 - protein, 14 aa, Artificial Sequence
  Description of Artificial Sequence: Synthetic peptide
WVRQAPGKGLEWVS

SEQ ID NO: 1624 - protein, 14 aa, Artificial Sequence
  Description of Artificial Sequence: Synthetic peptide
WVRQAPGKGLEWVS

SEQ ID NO: 1625 - protein, 14 aa, Artificial Sequence
  Description of Artificial Sequence: Synthetic peptide
WVRQAPGKGLEWVS

SEQ ID NO: 1626 - protein, 14 aa, Artificial Sequence
  Description of Artificial Sequence: Synthetic peptide
WVRQAPGKGLEWVS

SEQ ID NO: 1627 - protein, 14 aa, Artificial Sequence
  Description of Artificial Sequence: Synthetic peptide
WVRQAPGKGLEWVS

SEQ ID NO: 1628 - protein, 14 aa, Artificial Sequence
  Description of Artificial Sequence: Synthetic peptide
WVRQAPGKGLEWVS

SEQ ID NO: 1629 - protein, 14 aa, Artificial Sequence
  Description of Artificial Sequence: Synthetic peptide
WVRQAPGKGLEWVS

SEQ ID NO: 1630 - protein, 14 aa, Artificial Sequence
  Description of Artificial Sequence: Synthetic peptide
WVRQAPGKGLEWVS

SEQ ID NO: 1631 - protein, 14 aa, Artificial Sequence
  Description of Artificial Sequence: Synthetic peptide
WVRQAPGKGLEWVS

SEQ ID NO: 1632 - protein, 14 aa, Artificial Sequence
  Description of Artificial Sequence: Synthetic peptide
WVRQAPGKGLEWVS

SEQ ID NO: 1633 - protein, 14 aa, Artificial Sequence
  Description of Artificial Sequence: Synthetic peptide
WVRQAPGKGLEWVS

SEQ ID NO: 1634 - protein, 14 aa, Artificial Sequence
  Description of Artificial Sequence: Synthetic peptide
WVRQAPGKGLEWVS

SEQ ID NO: 1635 - protein, 14 aa, Artificial Sequence
  Description of Artificial Sequence: Synthetic peptide
WVRQAPGKGLEWVS

SEQ ID NO: 1636 - protein, 14 aa, Artificial Sequence
  Description of Artificial Sequence: Synthetic peptide
WVRQAPGKGLEWVS

SEQ ID NO: 1637 - protein, 14 aa, Artificial Sequence
  Description of Artificial Sequence: Synthetic peptide
WVRQAPGKGLEWVS

SEQ ID NO: 1638 - protein, 14 aa, Artificial Sequence
  Description of Artificial Sequence: Synthetic peptide
WVRQAPGKGLEWVS

SEQ ID NO: 1639 - protein, 14 aa, Artificial Sequence
  Description of Artificial Sequence: Synthetic peptide
WVRQAPGKGLEWVS

SEQ ID NO: 1640 - protein, 14 aa, Artificial Sequence
  Description of Artificial Sequence: Synthetic peptide
WVRQAPGKGLEWVS

SEQ ID NO: 1641 - protein, 14 aa, Artificial Sequence
  Description of Artificial Sequence: Synthetic peptide
WVRQAPGKGLEWVS

SEQ ID NO: 1642 - protein, 14 aa, Artificial Sequence
  Description of Artificial Sequence: Synthetic peptide
WVRQAPGKGLEWVS

SEQ ID NO: 1643 - protein, 14 aa, Artificial Sequence
  Description of Artificial Sequence: Synthetic peptide
WVRQAPGKGLEWVS

SEQ ID NO: 1644 - protein, 14 aa, Artificial Sequence
  Description of Artificial Sequence: Synthetic peptide
WVRQAPGKGLEWVS

SEQ ID NO: 1645 - protein, 17 aa, Artificial Sequence
  Description of Artificial Sequence: Synthetic peptide
GISPSGGETIYADSVKG

SEQ ID NO: 1646 - protein, 17 aa, Artificial Sequence
  Description of Artificial Sequence: Synthetic peptide
SIGPSGGDTYYADSVKG

SEQ ID NO: 1647 - protein, 17 aa, Artificial Sequence
  Description of Artificial Sequence: Synthetic peptide
SISPSGGHTFYADSVKG

SEQ ID NO: 1648 - protein, 17 aa, Artificial Sequence
  Description of Artificial Sequence: Synthetic peptide
GIGPSGGPTFYADSIKG

SEQ ID NO: 1649 - protein, 17 aa, Artificial Sequence
  Description of Artificial Sequence: Synthetic peptide
GIGPSGGPTFYADSIKG

SEQ ID NO: 1650 - protein, 17 aa, Artificial Sequence
  Description of Artificial Sequence: Synthetic peptide
GIVSSGGTTIYADSVKG

SEQ ID NO: 1651 - protein, 17 aa, Artificial Sequence
  Description of Artificial Sequence: Synthetic peptide
GISPSGGNTLYADSVKG

SEQ ID NO: 1652 - protein, 17 aa, Artificial Sequence
  Description of Artificial Sequence: Synthetic peptide
SIVPSGGFTIYADSVKG

SEQ ID NO: 1653 - protein, 17 aa, Artificial Sequence
  Description of Artificial Sequence: Synthetic peptide
GISPSGGPTMYADSVKG

SEQ ID NO: 1654 - protein, 17 aa, Artificial Sequence
  Description of Artificial Sequence: Synthetic peptide
GIGPSGGLTFYADSVKG

SEQ ID NO: 1655 - protein, 17 aa, Artificial Sequence
  Description of Artificial Sequence: Synthetic peptide
GIVPSGGLTMYADSVKG

SEQ ID NO: 1656 - protein, 17 aa, Artificial Sequence
  Description of Artificial Sequence: Synthetic peptide
SISPSGGYTFYADSVKG

SEQ ID NO: 1657 - protein, 17 aa, Artificial Sequence
  Description of Artificial Sequence: Synthetic peptide
GIGPSGGLTFYADSVKG

SEQ ID NO: 1658 - protein, 17 aa, Artificial Sequence
  Description of Artificial Sequence: Synthetic peptide
GISPSGGMTFYADSVKG

SEQ ID NO: 1659 - protein, 17 aa, Artificial Sequence
  Description of Artificial Sequence: Synthetic peptide
GIVSSGGTTIYADSVKG

SEQ ID NO: 1660 - protein, 17 aa, Artificial Sequence
  Description of Artificial Sequence: Synthetic peptide
GISPSGGNTMYADSVKG

SEQ ID NO: 1661 - protein, 17 aa, Artificial Sequence
  Description of Artificial Sequence: Synthetic peptide
SISPSGGYTFYADSVKG

SEQ ID NO: 1662 - protein, 17 aa, Artificial Sequence
  Description of Artificial Sequence: Synthetic peptide
GISPSGGMTFYADSVKG

SEQ ID NO: 1663 - protein, 17 aa, Artificial Sequence
  Description of Artificial Sequence: Synthetic peptide
SIVPSGGFTIYADSVKG

SEQ ID NO: 1664 - protein, 17 aa, Artificial Sequence
  Description of Artificial Sequence: Synthetic peptide
RISPSGGDTGYADSVKG

SEQ ID NO: 1665 - protein, 17 aa, Artificial Sequence
  Description of Artificial Sequence: Synthetic peptide
GISPSGGMTFYADSVKG

SEQ ID NO: 1666 - protein, 17 aa, Artificial Sequence
  Description of Artificial Sequence: Synthetic peptide
SIGPSGGDTYYADSVKG

SEQ ID NO: 1667 - protein, 17 aa, Artificial Sequence
  Description of Artificial Sequence: Synthetic peptide
SIVPSGGFTIYADSVKG

SEQ ID NO: 1668 - protein, 17 aa, Artificial Sequence
  Description of Artificial Sequence: Synthetic peptide
GIVSSGGTTIYADSVKG

SEQ ID NO: 1669 - protein, 17 aa, Artificial Sequence
  Description of Artificial Sequence: Synthetic peptide
GISPSGGLTFYADSVKG

SEQ ID NO: 1670 - protein, 17 aa, Artificial Sequence
  Description of Artificial Sequence: Synthetic peptide
SIGPSGGDTYYADSVKG

SEQ ID NO: 1671 - protein, 17 aa, Artificial Sequence
  Description of Artificial Sequence: Synthetic peptide
GIVSSGGTTIYADSVKG

SEQ ID NO: 1672 - protein, 17 aa, Artificial Sequence
  Description of Artificial Sequence: Synthetic peptide
GIVSSGGTTIYADSVKG

SEQ ID NO: 1673 - protein, 17 aa, Artificial Sequence
  Description of Artificial Sequence: Synthetic peptide
GISPSGGITFYADSVKG

SEQ ID NO: 1674 - protein, 17 aa, Artificial Sequence
  Description of Artificial Sequence: Synthetic peptide
VISSSGGFTFYADSVKG

SEQ ID NO: 1675 - protein, 17 aa, Artificial Sequence
  Description of Artificial Sequence: Synthetic peptide
GIVSSGGTTIYADSVKG

SEQ ID NO: 1676 - protein, 17 aa, Artificial Sequence
  Description of Artificial Sequence: Synthetic peptide
SISPSGGYTFYADSVKG

SEQ ID NO: 1677 - protein, 17 aa, Artificial Sequence
  Description of Artificial Sequence: Synthetic peptide
GISPSGGNTLYADSVKG

SEQ ID NO: 1678 - protein, 17 aa, Artificial Sequence
  Description of Artificial Sequence: Synthetic peptide
GIVSSGGTTIYADSVKG

SEQ ID NO: 1679 - protein, 17 aa, Artificial Sequence
  Description of Artificial Sequence: Synthetic peptide
GIGPSGGPTFYADSVKG

SEQ ID NO: 1680 - protein, 17 aa, Artificial Sequence
  Description of Artificial Sequence: Synthetic peptide
SISPSGGHTFYADSVKG

SEQ ID NO: 1681 - protein, 17 aa, Artificial Sequence
  Description of Artificial Sequence: Synthetic peptide
SIGPSGGDTYYADSVKG

SEQ ID NO: 1682 - protein, 17 aa, Artificial Sequence
  Description of Artificial Sequence: Synthetic peptide
GIGPSGGLTFYADSVKG

SEQ ID NO: 1683 - protein, 17 aa, Artificial Sequence
  Description of Artificial Sequence: Synthetic peptide
GIVPSGGLTMYADSVKG

SEQ ID NO: 1684 - protein, 17 aa, Artificial Sequence
  Description of Artificial Sequence: Synthetic peptide
GISPSGGMTFYADSVKG

SEQ ID NO: 1685 - protein, 17 aa, Artificial Sequence
  Description of Artificial Sequence: Synthetic peptide
GISPSGGITFYADSVKG

SEQ ID NO: 1686 - protein, 17 aa, Artificial Sequence
  Description of Artificial Sequence: Synthetic peptide
GIVSSGGTTIYADSVKG

SEQ ID NO: 1687 - protein, 17 aa, Artificial Sequence
  Description of Artificial Sequence: Synthetic peptide
SIGPSGGDTYYADSVKG

SEQ ID NO: 1688 - protein, 17 aa, Artificial Sequence
  Description of Artificial Sequence: Synthetic peptide
RISPSGGDTGYADSVKG

SEQ ID NO: 1689 - protein, 17 aa, Artificial Sequence
  Description of Artificial Sequence: Synthetic peptide
GIGPSGGPTFYADSIKG

SEQ ID NO: 1690 - protein, 32 aa, Artificial Sequence; identical to SEQ ID NO: 952
  Description of Artificial Sequence: Synthetic polypeptide

SEQ ID NO: 1691 - protein, 32 aa, Artificial Sequence; identical to SEQ ID NO: 952
  Description of Artificial Sequence: Synthetic polypeptide

SEQ ID NO: 1692 - protein, 32 aa, Artificial Sequence; identical to SEQ ID NO: 952
  Description of Artificial Sequence: Synthetic polypeptide

SEQ ID NO: 1693 - protein, 32 aa, Artificial Sequence; identical to SEQ ID NO: 952
  Description of Artificial Sequence: Synthetic polypeptide

SEQ ID NO: 1694 - protein, 32 aa, Artificial Sequence; identical to SEQ ID NO: 458
  Description of Artificial Sequence: Synthetic polypeptide

SEQ ID NO: 1695 - protein, 32 aa, Artificial Sequence; identical to SEQ ID NO: 973
  Description of Artificial Sequence: Synthetic polypeptide

SEQ ID NO: 1696 - protein, 32 aa, Artificial Sequence; identical to SEQ ID NO: 458
  Description of Artificial Sequence: Synthetic polypeptide

SEQ ID NO: 1697 - protein, 32 aa, Artificial Sequence; identical to SEQ ID NO: 458
  Description of Artificial Sequence: Synthetic polypeptide

SEQ ID NO: 1698 - protein, 32 aa, Artificial Sequence; identical to SEQ ID NO: 458
  Description of Artificial Sequence: Synthetic polypeptide

SEQ ID NO: 1699 - protein, 32 aa, Artificial Sequence; identical to SEQ ID NO: 952
  Description of Artificial Sequence: Synthetic polypeptide

SEQ ID NO: 1700 - protein, 32 aa, Artificial Sequence; identical to SEQ ID NO: 458
  Description of Artificial Sequence: Synthetic polypeptide

SEQ ID NO: 1701 - protein, 32 aa, Artificial Sequence; identical to SEQ ID NO: 952
  Description of Artificial Sequence: Synthetic polypeptide

SEQ ID NO: 1702 - protein, 32 aa, Artificial Sequence; identical to SEQ ID NO: 458
  Description of Artificial Sequence: Synthetic polypeptide

SEQ ID NO: 1703 - protein, 32 aa, Artificial Sequence; identical to SEQ ID NO: 952
  Description of Artificial Sequence: Synthetic polypeptide

SEQ ID NO: 1704 - protein, 32 aa, Artificial Sequence; identical to SEQ ID NO: 458
  Description of Artificial Sequence: Synthetic polypeptide

SEQ ID NO: 1705 - protein, 32 aa, Artificial Sequence; identical to SEQ ID NO: 973
  Description of Artificial Sequence: Synthetic polypeptide

SEQ ID NO: 1706 - protein, 32 aa, Artificial Sequence; identical to SEQ ID NO: 458
  Description of Artificial Sequence: Synthetic polypeptide

SEQ ID NO: 1707 - protein, 32 aa, Artificial Sequence; identical to SEQ ID NO: 458
  Description of Artificial Sequence: Synthetic polypeptide

SEQ ID NO: 1708 - protein, 32 aa, Artificial Sequence; identical to SEQ ID NO: 952
  Description of Artificial Sequence: Synthetic polypeptide

SEQ ID NO: 1709 - protein, 32 aa, Artificial Sequence; identical to SEQ ID NO: 458
  Description of Artificial Sequence: Synthetic polypeptide

SEQ ID NO: 1710 - protein, 32 aa, Artificial Sequence; identical to SEQ ID NO: 952
  Description of Artificial Sequence: Synthetic polypeptide

SEQ ID NO: 1711 - protein, 32 aa, Artificial Sequence; identical to SEQ ID NO: 952
  Description of Artificial Sequence: Synthetic polypeptide

SEQ ID NO: 1712 - protein, 32 aa, Artificial Sequence; identical to SEQ ID NO: 458
  Description of Artificial Sequence: Synthetic polypeptide

SEQ ID NO: 1713 - protein, 32 aa, Artificial Sequence; identical to SEQ ID NO: 458
  Description of Artificial Sequence: Synthetic polypeptide

SEQ ID NO: 1714 - protein, 32 aa, Artificial Sequence; identical to SEQ ID NO: 952
  Description of Artificial Sequence: Synthetic polypeptide

SEQ ID NO: 1715 - protein, 32 aa, Artificial Sequence; identical to SEQ ID NO: 952
  Description of Artificial Sequence: Synthetic polypeptide

SEQ ID NO: 1716 - protein, 32 aa, Artificial Sequence; identical to SEQ ID NO: 952
  Description of Artificial Sequence: Synthetic polypeptide

SEQ ID NO: 1717 - protein, 32 aa, Artificial Sequence; identical to SEQ ID NO: 952
  Description of Artificial Sequence: Synthetic polypeptide

SEQ ID NO: 1718 - protein, 32 aa, Artificial Sequence; identical to SEQ ID NO: 952
  Description of Artificial Sequence: Synthetic polypeptide

SEQ ID NO: 1719 - protein, 32 aa, Artificial Sequence; identical to SEQ ID NO: 458
  Description of Artificial Sequence: Synthetic polypeptide

SEQ ID NO: 1720 - protein, 32 aa, Artificial Sequence; identical to SEQ ID NO: 458
  Description of Artificial Sequence: Synthetic polypeptide

SEQ ID NO: 1721 - protein, 32 aa, Artificial Sequence; identical to SEQ ID NO: 952
  Description of Artificial Sequence: Synthetic polypeptide

SEQ ID NO: 1722 - protein, 32 aa, Artificial Sequence; identical to SEQ ID NO: 458
  Description of Artificial Sequence: Synthetic polypeptide

SEQ ID NO: 1723 - protein, 32 aa, Artificial Sequence; identical to SEQ ID NO: 952
  Description of Artificial Sequence: Synthetic polypeptide

SEQ ID NO: 1724 - protein, 32 aa, Artificial Sequence; identical to SEQ ID NO: 458
  Description of Artificial Sequence: Synthetic polypeptide

SEQ ID NO: 1725 - protein, 32 aa, Artificial Sequence; identical to SEQ ID NO: 458
  Description of Artificial Sequence: Synthetic polypeptide

SEQ ID NO: 1726 - protein, 32 aa, Artificial Sequence; identical to SEQ ID NO: 458
  Description of Artificial Sequence: Synthetic polypeptide

SEQ ID NO: 1727 - protein, 32 aa, Artificial Sequence; identical to SEQ ID NO: 458
  Description of Artificial Sequence: Synthetic polypeptide

SEQ ID NO: 1728 - protein, 32 aa, Artificial Sequence; identical to SEQ ID NO: 952
  Description of Artificial Sequence: Synthetic polypeptide

SEQ ID NO: 1729 - protein, 32 aa, Artificial Sequence; identical to SEQ ID NO: 458
  Description of Artificial Sequence: Synthetic polypeptide

SEQ ID NO: 1730 - protein, 32 aa, Artificial Sequence; identical to SEQ ID NO: 952
  Description of Artificial Sequence: Synthetic polypeptide

SEQ ID NO: 1731 - protein, 32 aa, Artificial Sequence; identical to SEQ ID NO: 952
  Description of Artificial Sequence: Synthetic polypeptide

SEQ ID NO: 1732 - protein, 32 aa, Artificial Sequence; identical to SEQ ID NO: 952
  Description of Artificial Sequence: Synthetic polypeptide

SEQ ID NO: 1733 - protein, 32 aa, Artificial Sequence; identical to SEQ ID NO: 458
  Description of Artificial Sequence: Synthetic polypeptide

SEQ ID NO: 1734 - protein, 32 aa, Artificial Sequence; identical to SEQ ID NO: 458
  Description of Artificial Sequence: Synthetic polypeptide

SEQ ID NO: 1735 - protein, 13 aa, Artificial Sequence
  Description of Artificial Sequence: Synthetic peptide
DIWGAYASGLFDY

SEQ ID NO: 1736 - protein, 13 aa, Artificial Sequence
  Description of Artificial Sequence: Synthetic peptide
DIRGAYSSGLFYD

SEQ ID NO: 1737 - protein, 13 aa, Artificial Sequence
  Description of Artificial Sequence: Synthetic peptide
DMRGAYASGLFDY

SEQ ID NO: 1738 - protein, 13 aa, Artificial Sequence
  Description of Artificial Sequence: Synthetic peptide
DIWGAYASGLFDY

SEQ ID NO: 1739 - protein, 13 aa, Artificial Sequence
  Description of Artificial Sequence: Synthetic peptide
DIRGPYSSGLFDY

SEQ ID NO: 1740 - protein, 13 aa, Artificial Sequence
  Description of Artificial Sequence: Synthetic peptide
DIRGAYSSGHFDY

SEQ ID NO: 1741 - protein, 13 aa, Artificial Sequence
  Description of Artificial Sequence: Synthetic peptide
DISGAYSSGLFTF

SEQ ID NO: 1742 - protein, 13 aa, Artificial Sequence
  Description of Artificial Sequence: Synthetic peptide
DIRGAYSSGLFDY

SEQ ID NO: 1743 - protein, 13 aa, Artificial Sequence
  Description of Artificial Sequence: Synthetic peptide
DIRGPYSSGLFDY

SEQ ID NO: 1744 - protein, 13 aa, Artificial Sequence
  Description of Artificial Sequence: Synthetic peptide
DIRGAYSSGMFDF

SEQ ID NO: 1745 - protein, 13 aa, Artificial Sequence
  Description of Artificial Sequence: Synthetic peptide
DISGAYSSGLFTF

SEQ ID NO: 1746 - protein, 13 aa, Artificial Sequence
  Description of Artificial Sequence: Synthetic peptide
DMRGAYASGLFDY

SEQ ID NO: 1747 - protein, 13 aa, Artificial Sequence
  Description of Artificial Sequence: Synthetic peptide
DIRGAYSSGLFDF

SEQ ID NO: 1748 - protein, 13 aa, Artificial Sequence
  Description of Artificial Sequence: Synthetic peptide
DMRGAYASGLFDY

SEQ ID NO: 1749 - protein, 13 aa, Artificial Sequence
  Description of Artificial Sequence: Synthetic peptide
DIRGPYSSGLFDY

SEQ ID NO: 1750 - protein, 13 aa, Artificial Sequence
  Description of Artificial Sequence: Synthetic peptide
DIRGAYSSGHFDY

SEQ ID NO: 1751 - protein, 13 aa, Artificial Sequence
  Description of Artificial Sequence: Synthetic peptide
DIRGAYSSGLFDY

SEQ ID NO: 1752 - protein, 13 aa, Artificial Sequence
  Description of Artificial Sequence: Synthetic peptide
DIRGAYSSGLFDY

SEQ ID NO: 1753 - protein, 13 aa, Artificial Sequence
  Description of Artificial Sequence: Synthetic peptide
DLSGEYASGLFGY

SEQ ID NO: 1754 - protein, 13 aa, Artificial Sequence
  Description of Artificial Sequence: Synthetic peptide
DIRGAYSGGLFDY

SEQ ID NO: 1755 - protein, 13 aa, Artificial Sequence
  Description of Artificial Sequence: Synthetic peptide
DIRGAYSSGMFDF

SEQ ID NO: 1756 - protein, 13 aa, Artificial Sequence
  Description of Artificial Sequence: Synthetic peptide
DLSGEYASGLFGY

SEQ ID NO: 1757 - protein, 13 aa, Artificial Sequence
  Description of Artificial Sequence: Synthetic peptide
DISGAYSSGLFTF

SEQ ID NO: 1758 - protein, 13 aa, Artificial Sequence
  Description of Artificial Sequence: Synthetic peptide
DIRGAYSSGLFDH

SEQ ID NO: 1759 - protein, 13 aa, Artificial Sequence
  Description of Artificial Sequence: Synthetic peptide
DIWGAYASGLFDY

SEQ ID NO: 1760 - protein, 13 aa, Artificial Sequence
  Description of Artificial Sequence: Synthetic peptide
DIWGAYSAGHFEY

SEQ ID NO: 1761 - protein, 13 aa, Artificial Sequence
  Description of Artificial Sequence: Synthetic peptide
DIWGAYSAGHFEY

SEQ ID NO: 1762 - protein, 13 aa, Artificial Sequence
  Description of Artificial Sequence: Synthetic peptide
DIRGAYSSGLFYD

SEQ ID NO: 1763 - protein, 13 aa, Artificial Sequence
  Description of Artificial Sequence: Synthetic peptide
DLSGEYASGLFGY

SEQ ID NO: 1764 - protein, 13 aa, Artificial Sequence
  Description of Artificial Sequence: Synthetic peptide
DISGAYSSGLFTF

SEQ ID NO: 1765 - protein, 13 aa, Artificial Sequence
  Description of Artificial Sequence: Synthetic peptide
DIRGAYSSGLFDF

SEQ ID NO: 1766 - protein, 13 aa, Artificial Sequence
  Description of Artificial Sequence: Synthetic peptide
DLSGEYASGLFGY

SEQ ID NO: 1767 - protein, 13 aa, Artificial Sequence
  Description of Artificial Sequence: Synthetic peptide
DIRGAYSSGLFDY

SEQ ID NO: 1768 - protein, 13 aa, Artificial Sequence
  Description of Artificial Sequence: Synthetic peptide
DFSGAYSAGLFAY

SEQ ID NO: 1769 - protein, 13 aa, Artificial Sequence
  Description of Artificial Sequence: Synthetic peptide
DIRGAYSSGLFDY

SEQ ID NO: 1770 - protein, 13 aa, Artificial Sequence
  Description of Artificial Sequence: Synthetic peptide
DIRGPYSSGLFDY

SEQ ID NO: 1771 - protein, 13 aa, Artificial Sequence
  Description of Artificial Sequence: Synthetic peptide
DIRGAYSSGLFDY

SEQ ID NO: 1772 - protein, 13 aa, Artificial Sequence
  Description of Artificial Sequence: Synthetic peptide
DIRGAYSSGLFDH

SEQ ID NO: 1773 - protein, 13 aa, Artificial Sequence
  Description of Artificial Sequence: Synthetic peptide
DIMGAYASGLFHN

SEQ ID NO: 1774 - protein, 13 aa, Artificial Sequence
  Description of Artificial Sequence: Synthetic peptide
DIRGAYSSGLFDF

SEQ ID NO: 1775 - protein, 13 aa, Artificial Sequence
  Description of Artificial Sequence: Synthetic peptide
DIWGAYSAGHFEY

SEQ ID NO: 1776 - protein, 13 aa, Artificial Sequence
  Description of Artificial Sequence: Synthetic peptide
DLSGEYASGLFGY

SEQ ID NO: 1777 - protein, 13 aa, Artificial Sequence
  Description of Artificial Sequence: Synthetic peptide
DMRGAYASGLFDY

SEQ ID NO: 1778 - protein, 13 aa, Artificial Sequence
  Description of Artificial Sequence: Synthetic peptide
DIRGAYSSGLFDH

SEQ ID NO: 1779 - protein, 13 aa, Artificial Sequence
  Description of Artificial Sequence: Synthetic peptide
DIRGAYSGGLFDY

SEQ ID NO: 1780 - protein, 104 aa, Artificial Sequence; identical to SEQ ID NO: 608
  Description of Artificial Sequence: Synthetic polypeptide

SEQ ID NO: 1781 - protein, 104 aa, Artificial Sequence; identical to SEQ ID NO: 608
  Description of Artificial Sequence: Synthetic polypeptide

SEQ ID NO: 1782 - protein, 104 aa, Artificial Sequence; identical to SEQ ID NO: 608
  Description of Artificial Sequence: Synthetic polypeptide

SEQ ID NO: 1783 - protein, 104 aa, Artificial Sequence; identical to SEQ ID NO: 608
  Description of Artificial Sequence: Synthetic polypeptide

SEQ ID NO: 1784 - protein, 104 aa, Artificial Sequence; identical to SEQ ID NO: 608
  Description of Artificial Sequence: Synthetic polypeptide

SEQ ID NO: 1785 - protein, 104 aa, Artificial Sequence; identical to SEQ ID NO: 608
  Description of Artificial Sequence: Synthetic polypeptide

SEQ ID NO: 1786 - protein, 104 aa, Artificial Sequence; identical to SEQ ID NO: 608
  Description of Artificial Sequence: Synthetic polypeptide

SEQ ID NO: 1787 - protein, 104 aa, Artificial Sequence; identical to SEQ ID NO: 608
  Description of Artificial Sequence: Synthetic polypeptide

SEQ ID NO: 1788 - protein, 104 aa, Artificial Sequence; identical to SEQ ID NO: 608
  Description of Artificial Sequence: Synthetic polypeptide

SEQ ID NO: 1789 - protein, 104 aa, Artificial Sequence; identical to SEQ ID NO: 608
  Description of Artificial Sequence: Synthetic polypeptide

SEQ ID NO: 1790 - protein, 104 aa, Artificial Sequence; identical to SEQ ID NO: 608
  Description of Artificial Sequence: Synthetic polypeptide

SEQ ID NO: 1791 - protein, 104 aa, Artificial Sequence; identical to SEQ ID NO: 608
  Description of Artificial Sequence: Synthetic polypeptide

SEQ ID NO: 1792 - protein, 104 aa, Artificial Sequence; identical to SEQ ID NO: 608
  Description of Artificial Sequence: Synthetic polypeptide

SEQ ID NO: 1793 - protein, 104 aa, Artificial Sequence; identical to SEQ ID NO: 608
  Description of Artificial Sequence: Synthetic polypeptide

SEQ ID NO: 1794 - protein, 104 aa, Artificial Sequence; identical to SEQ ID NO: 608
  Description of Artificial Sequence: Synthetic polypeptide

SEQ ID NO: 1795 - protein, 104 aa, Artificial Sequence; identical to SEQ ID NO: 608
  Description of Artificial Sequence: Synthetic polypeptide

SEQ ID NO: 1796 - protein, 104 aa, Artificial Sequence; identical to SEQ ID NO: 608
  Description of Artificial Sequence: Synthetic polypeptide

SEQ ID NO: 1797 - protein, 104 aa, Artificial Sequence; identical to SEQ ID NO: 608
  Description of Artificial Sequence: Synthetic polypeptide

SEQ ID NO: 1798 - protein, 104 aa, Artificial Sequence; identical to SEQ ID NO: 608
  Description of Artificial Sequence: Synthetic polypeptide

SEQ ID NO: 1799 - protein, 104 aa, Artificial Sequence; identical to SEQ ID NO: 608
  Description of Artificial Sequence: Synthetic polypeptide

SEQ ID NO: 1800 - protein, 104 aa, Artificial Sequence; identical to SEQ ID NO: 608
  Description of Artificial Sequence: Synthetic polypeptide

SEQ ID NO: 1801 - protein, 104 aa, Artificial Sequence; identical to SEQ ID NO: 608
  Description of Artificial Sequence: Synthetic polypeptide

SEQ ID NO: 1802 - protein, 104 aa, Artificial Sequence; identical to SEQ ID NO: 608
  Description of Artificial Sequence: Synthetic polypeptide

SEQ ID NO: 1803 - protein, 104 aa, Artificial Sequence; identical to SEQ ID NO: 608
  Description of Artificial Sequence: Synthetic polypeptide

SEQ ID NO: 1804 - protein, 104 aa, Artificial Sequence; identical to SEQ ID NO: 608
  Description of Artificial Sequence: Synthetic polypeptide

SEQ ID NO: 1805 - protein, 104 aa, Artificial Sequence; identical to SEQ ID NO: 608
  Description of Artificial Sequence: Synthetic polypeptide

SEQ ID NO: 1806 - protein, 104 aa, Artificial Sequence; identical to SEQ ID NO: 608
  Description of Artificial Sequence: Synthetic polypeptide

SEQ ID NO: 1807 - protein, 104 aa, Artificial Sequence; identical to SEQ ID NO: 608
  Description of Artificial Sequence: Synthetic polypeptide

SEQ ID NO: 1808 - protein, 104 aa, Artificial Sequence; identical to SEQ ID NO: 608
  Description of Artificial Sequence: Synthetic polypeptide

SEQ ID NO: 1809 - protein, 104 aa, Artificial Sequence; identical to SEQ ID NO: 608
  Description of Artificial Sequence: Synthetic polypeptide

SEQ ID NO: 1810 - protein, 104 aa, Artificial Sequence; identical to SEQ ID NO: 608
  Description of Artificial Sequence: Synthetic polypeptide

SEQ ID NO: 1811 - protein, 104 aa, Artificial Sequence; identical to SEQ ID NO: 608
  Description of Artificial Sequence: Synthetic polypeptide

SEQ ID NO: 1812 - protein, 104 aa, Artificial Sequence; identical to SEQ ID NO: 608
  Description of Artificial Sequence: Synthetic polypeptide

SEQ ID NO: 1813 - protein, 104 aa, Artificial Sequence; identical to SEQ ID NO: 608
  Description of Artificial Sequence: Synthetic polypeptide

SEQ ID NO: 1814 - protein, 104 aa, Artificial Sequence; identical to SEQ ID NO: 608
  Description of Artificial Sequence: Synthetic polypeptide

SEQ ID NO: 1815 - protein, 104 aa, Artificial Sequence; identical to SEQ ID NO: 608
  Description of Artificial Sequence: Synthetic polypeptide

SEQ ID NO: 1816 - protein, 104 aa, Artificial Sequence; identical to SEQ ID NO: 608
  Description of Artificial Sequence: Synthetic polypeptide

SEQ ID NO: 1817 - protein, 104 aa, Artificial Sequence; identical to SEQ ID NO: 608
  Description of Artificial Sequence: Synthetic polypeptide

SEQ ID NO: 1818 - protein, 104 aa, Artificial Sequence; identical to SEQ ID NO: 608
  Description of Artificial Sequence: Synthetic polypeptide

SEQ ID NO: 1819 - protein, 104 aa, Artificial Sequence; identical to SEQ ID NO: 608
  Description of Artificial Sequence: Synthetic polypeptide

SEQ ID NO: 1820 - protein, 104 aa, Artificial Sequence; identical to SEQ ID NO: 608
  Description of Artificial Sequence: Synthetic polypeptide

SEQ ID NO: 1821 - protein, 104 aa, Artificial Sequence; identical to SEQ ID NO: 608
  Description of Artificial Sequence: Synthetic polypeptide

SEQ ID NO: 1822 - protein, 104 aa, Artificial Sequence; identical to SEQ ID NO: 608
  Description of Artificial Sequence: Synthetic polypeptide

SEQ ID NO: 1823 - protein, 104 aa, Artificial Sequence; identical to SEQ ID NO: 608
  Description of Artificial Sequence: Synthetic polypeptide

SEQ ID NO: 1824 - protein, 104 aa, Artificial Sequence; identical to SEQ ID NO: 608
  Description of Artificial Sequence: Synthetic polypeptide

SEQ ID NO: 1825 - protein, 122 aa, Artificial Sequence
  Description of Artificial Sequence: Synthetic polypeptide
EVQLLESGGGLVQPGGSLRLSCAASGFTFSPYWMHWVRQAPGKGLEWVSGISPSGGETIYADSVKGRFTISRDNSKNTLYLQMNSLRAEDTAVYYCARDIWGAYASGLFDYWGRGTLVTVSS

SEQ ID NO: 1826 - protein, 122 aa, Artificial Sequence
  Description of Artificial Sequence: Synthetic polypeptide
EVQLLESGGGLVQPGGSLRLSCAASGFTFSWYWMVWVRQAPGKGLEWVSSIGPSGGDTYYADSVKGRFTISRDNSKNTLYLQMNSLRAEDTAVYYCARDIRGAYSSGLFYDWGRGTLVTVSS

SEQ ID NO: 1827 - protein, 122 aa, Artificial Sequence
  Description of Artificial Sequence: Synthetic polypeptide
EVQLLESGGGLVQPGGSLRLSCAASGFTFSEYWMAWVRQAPGKGLEWVSSISPSGGHTFYADSVKGRFTISRDNSKNTLYLQMNSLRAEDTAVYYCARDMRGAYASGLFDYWGRGTLVTVSS

SEQ ID NO: 1828 - protein, 122 aa, Artificial Sequence
  Description of Artificial Sequence: Synthetic polypeptide
EVQLLESGGGLVQPGGSLRLSCAASGFTFSPYWMHWVRQAPGKGLEWVSGIGPSGGPTFYADSIKGRFTISRDNSKNTLYLQMNSLRAEDTAVYYCARDIWGAYASGLFDYWGRGTLVTVSS

SEQ ID NO: 1829 - protein, 122 aa, Artificial Sequence
  Description of Artificial Sequence: Synthetic polypeptide
EVQLLESGGGLVQPGGSLRLSCAASGFTFSPYWMHWVRQAPGKGLEWVSGIGPSGGPTFYADSIKGRFTISRDNSKNTLYLQMNSLRAEDTAVYYCAKDIRGPYSSGLFDYWGRGTLVTVSS

SEQ ID NO: 1830 - protein, 122 aa, Artificial Sequence
  Description of Artificial Sequence: Synthetic polypeptide
EVQLLESGGGLVQPGGSLRLSCAASGFTFSWYWMHWVRQAPGKGLEWVSGIVSSGGTTIYADSVKGRFTISRDDSKNTLYLQMNSLGAEATAVYYCARDIRGAYSSGHFDYWGRGTLVTVSS

SEQ ID NO: 1831 - protein, 122 aa, Artificial Sequence
  Description of Artificial Sequence: Synthetic polypeptide
EVQLLESGGGLVQPGGSLRLSCAASGFTFSPYWMHWVRQAPGKGLEWVSGISPSGGNTLYADSVKGRFTISRDNSKNTLYLQMNSLRAEDTAVYYCAKDISGAYSSGLFTFWGRGTLVTVSS

SEQ ID NO: 1832 - protein, 122 aa, Artificial Sequence; identical to SEQ ID NO: 671
  Description of Artificial Sequence: Synthetic polypeptide

SEQ ID NO: 1833 - protein, 122 aa, Artificial Sequence; identical to SEQ ID NO: 1073
  Description of Artificial Sequence: Synthetic polypeptide

SEQ ID NO: 1834 - protein, 122 aa, Artificial Sequence
  Description of Artificial Sequence: Synthetic polypeptide
EVQLLESGGGLVQPGGSLRLSCAASGFTFSPYWMHWVRQAPGKGLEWVSGIGPSGGLTFYADSVKGRFTISRDNSKNTLYLQMNSLRAEDTAVYYCARDIRGAYSSGMFDFWGRGTLVTVSS

SEQ ID NO: 1835 - protein, 122 aa, Artificial Sequence
  Description of Artificial Sequence: Synthetic polypeptide
EVQLLESGGGLVQPGGSLRLSCAASGFTFSHYWMQWVRQAPGKGLEWVSGIVPSGGLTMYADSVKGRFTISRDNSKNTLYLQMNSLRAEDTAVYYCAKDISGAYSSGLFTFWGRGTLVTVSS

SEQ ID NO: 1836 - protein, 122 aa, Artificial Sequence
  Description of Artificial Sequence: Synthetic polypeptide
EVQLLESGGGLVQPGGSLRLSCAASGFTFSWYWMGWVRQAPGKGLEWVSSISPSGGYTFYADSVKGRFTISRDNSKNTLYLQMNSLRAEDTAVYYCARDMRGAYASGLFDYWGRGTLVTVSS

SEQ ID NO: 1837 - protein, 122 aa, Artificial Sequence
  Description of Artificial Sequence: Synthetic polypeptide
EVQLLESGGGLVQPGGSLRLSCAASGFTFSPYWMHWVRQAPGKGLEWVSGIGPSGGLTFYADSVKGRFTISRDNSKNTLYLQMNSLRAEDTAVYYCAKDIRGAYSSGLFDFWGRGTLVTVSS

SEQ ID NO: 1838 - protein, 122 aa, Artificial Sequence
  Description of Artificial Sequence: Synthetic polypeptide
EVQLLESGGGLVQPGGSLRLSCAASGFTFSEYWMTWVRQAPGKGLEWVSGISPSGGMTFYADSVKGRFTISRDNSKNTLYLQMNSLRAEDTAVYYCARDMRGAYASGLFDYWGRGTLVTVSS

SEQ ID NO: 1839 - protein, 122 aa, Artificial Sequence
  Description of Artificial Sequence: Synthetic polypeptide
EVQLLESGGGLVQPGGSLRLSCAASGFTFSWYWMHWVRQAPGKGLEWVSGIVSSGGTTIYADSVKGRFTISRDNSKNTLYLQMNSLRAEDTAVYYCAKDIRGPYSSGLFDYWGRGTLVTVSS

SEQ ID NO: 1840 - protein, 121 aa, Artificial Sequence
  Description of Artificial Sequence: Synthetic polypeptide
EVQLLESGGGLVQPGGSLRLSCAASGFTFSPYNMHWVRQAPGKGLEWVSGISPSGGNTMYADSVKGRFTISRDDSKNTLYLQMNSLGAEATAVYYCARDIRGAYSSGHFDYWGRGTLVTSL

SEQ ID NO: 1841 - protein, 122 aa, Artificial Sequence; identical to SEQ ID NO: 644
  Description of Artificial Sequence: Synthetic polypeptide

SEQ ID NO: 1842 - protein, 122 aa, Artificial Sequence; identical to SEQ ID NO: 662
  Description of Artificial Sequence: Synthetic polypeptide

SEQ ID NO: 1843 - protein, 122 aa, Artificial Sequence
  Description of Artificial Sequence: Synthetic polypeptide
EVQLLESGGGLVQPGGSLRLSCAASGFTFSWYWMVWVRQAPGKGLEWVSSIVPSGGFTIYADSVKGRFTISRDNSKNTLYLQMNSLRAEDTAVYYCARDLSGEYASGLFGYWGRGTLVTVSS

SEQ ID NO: 1844 - protein, 122 aa, Artificial Sequence
  Description of Artificial Sequence: Synthetic polypeptide
EVQLLESGGGLVQPGGSLRLSCAASGFTFSWYNMSWVRQAPGKGLEWVSRISPSGGDTGYADSVKGRFTISRDNSKNTLYLQMNSLRAEDTAVYYCAKDIRGAYSGGLFDYWGRGTLVTVSS

SEQ ID NO: 1845 - protein, 122 aa, Artificial Sequence
  Description of Artificial Sequence: Synthetic polypeptide
EVQLLESGGGLVQPGGSLRLSCAASGFTFSEYWMTWVRQAPGKGLEWVSGISPSGGMTFYADSVKGRFTISRDNSKNTLYLQMNSLRAEDTAVYYCARDIRGAYSSGMFDFWGRGTLVTVSS

SEQ ID NO: 1846 - protein, 122 aa, Artificial Sequence
  Description of Artificial Sequence: Synthetic polypeptide
EVQLLESGGGLVQPGGSLRLSCAASGFTFSWYWMVWVRQAPGKGLEWVSSIGPSGGDTYYADSVKGRFTISRDNSKNTLYLQMNSLRAEDTAVYYCARDLSGEYASGLFGYWGRGTLVTVSS

SEQ ID NO: 1847 - protein, 122 aa, Artificial Sequence
  Description of Artificial Sequence: Synthetic polypeptide
EVQLLESGGGLVQPGGSLRLSCAASGFTFSWYWMVWVRQAPGKGLEWVSSIVPSGGFTIYADSVKGRFTISRDNSKNTLYLQMNSLRAEDTAVYYCAKDISGAYSSGLFTFWGRGTLVTVSS

SEQ ID NO: 1848 - protein, 122 aa, Artificial Sequence
  Description of Artificial Sequence: Synthetic polypeptide
EVQLLESGGGLVQPGGSLRLSCAASGFTFSWYWMHWVRQAPGKGLEWVSGIVSSGGTTIYADSVKGRFTISRDNSKNTLYLQMNSLRAEDTAVYYCAKDIRGAYSSGLFDHWGRGTLVTVSS

SEQ ID NO: 1849 - protein, 122 aa, Artificial Sequence
  Description of Artificial Sequence: Synthetic polypeptide
EVQLLESGGGLVQPGGSLRLSCAASGFTFSAYWMHWVRQAPGKGLEWVSGISPSGGLTFYADSVKGRFTISRDNSKNTLYLQMNSLRAEDTAVYYCARDIWGAYASGLFDYWGRGTLVTVSS

SEQ ID NO: 1850 - protein, 122 aa, Artificial Sequence
  Description of Artificial Sequence: Synthetic polypeptide
EVQLLESGGGLVQPGGSLRLSCAASGFTFSWYWMVWVRQAPGKGLEWVSSIGPSGGDTYYADSVKGRFTISRDNSKNTLYLQMNSLRAEDTAVYYCARDIWGAYSAGHFEYWGRGTLVTVSS

SEQ ID NO: 1851 - protein, 122 aa, Artificial Sequence
  Description of Artificial Sequence: Synthetic polypeptide
EVQLLESGGGLVQPGGSLRLSCAASGFTFSWYWMHWVRQAPGKGLEWVSGIVSSGGTTIYADSVKGRFTISRDNSKNTLYLQMNSLRAEDTAVYYCARDIWGAYSAGHFEYWGRGTLVTVSS

SEQ ID NO: 1852 - protein, 122 aa, Artificial Sequence
  Description of Artificial Sequence: Synthetic polypeptide
EVQLLESGGGLVQPGGSLRLSCAASGFTFSWYWMHWVRQAPGKGLEWVSGIVSSGGTTIYADSVKGRFTISRDNSKNTLYLQMNSLRAEDTAVYYCARDIRGAYSSGLFYDWGRGTLVTVSS

SEQ ID NO: 1853 - protein, 122 aa, Artificial Sequence
  Description of Artificial Sequence: Synthetic polypeptide
EVQLLESGGGLVQPGGSLRLSCAASGFTFSPYWMSWVRQAPGKGLEWVSGISPSGGITFYADSVKGRFTISRDNSKNTLYLQMNSLRAEDTAVYYCARDLSGEYASGLFGYWGRGTLVTVSS

SEQ ID NO: 1854 - protein, 122 aa, Artificial Sequence
  Description of Artificial Sequence: Synthetic polypeptide
EVQLLESGGGLVQPGGSLRLSCAASGFTFSYYGMGWVRQAPGKGLEWVSVISSSGGFTFYADSVKGRFTISRDNSKNTLYLQMNSLRAEDTAVYYCAKDISGAYSSGLFTFWGRGTLVTVSS

SEQ ID NO: 1855 - protein, 122 aa, Artificial Sequence
  Description of Artificial Sequence: Synthetic polypeptide
EVQLLESGGGLVQPGGSLRLSCAASGFTFSWYWMHWVRQAPGKGLEWVSGIVSSGGTTIYADSVKGRFTISRDNSKNTLYLQMNSLRAEDTAVYYCAKDIRGAYSSGLFDFWGRGTLVTVSS

SEQ ID NO: 1856 - protein, 122 aa, Artificial Sequence
  Description of Artificial Sequence: Synthetic polypeptide
EVQLLESGGGLVQPGGSLRLSCAASGFTFSWYWMGWVRQAPGKGLEWVSSISPSGGYTFYADSVKGRFTISRDNSKNTLYLQMNSLRAEDTAVYYCARDLSGEYASGLFGYWGRGTLVTVSS

SEQ ID NO: 1857 - protein, 122 aa, Artificial Sequence
  Description of Artificial Sequence: Synthetic polypeptide
EVQLLESGGGLVQPGGSLRLSCAASGFTFSPYWMHWVRQAPGKGLEWVSGISPSGGNTLYADSVKGRFTISRDNSKNTLYLQMNSLRAEDTAVYYCAKDIRGAYSSGLFDYWGRGTLVTVSS

SEQ ID NO: 1858 - protein, 122 aa, Artificial Sequence
  Description of Artificial Sequence: Synthetic polypeptide
EVQLLESGGGLVQPGGSLRLSCAASGFTFSWYWMHWVRQAPGKGLEWVSGIVSSGGTTIYADSVKGRFTISRDNSKNTLYLQMNSLRAEDTAVYYCARDFSGAYSAGLFAYWGRGTLVTVSS

SEQ ID NO: 1859 - protein, 122 aa, Artificial Sequence
  Description of Artificial Sequence: Synthetic polypeptide
EVQLLESGGGLVQPGGSLRLSCAASGFTFSPYWMHWVRQAPGKGLEWVSGIGPSGGPTFYADSVKGRFTISRDNSKNTLYLQMNSLRAEDTAVYYCAKDIRGAYSSGLFDYWGRGTLVTVSS

SEQ ID NO: 1860 - protein, 122 aa, Artificial Sequence
  Description of Artificial Sequence: Synthetic polypeptide
EVQLLESGGGLVQPGGSLRLSCAASGFTFSEYWMAWVRQAPGKGLEWVSSISPSGGHTFYADSVKGRFTISRDNSKNTLYLQMNSLRAEDTAVYYCAKDIRGPYSSGLFDYWGRGTLVTVSS

SEQ ID NO: 1861 - protein, 122 aa, Artificial Sequence; identical to SEQ ID NO: 647
  Description of Artificial Sequence: Synthetic polypeptide

SEQ ID NO: 1862 - protein, 122 aa, Artificial Sequence
  Description of Artificial Sequence: Synthetic polypeptide
EVQLLESGGGLVQPGGSLRLSCAASGFTFSPYWMHWVRQAPGKGLEWVSGIGPSGGLTFYADSVKGRFTISRDNSKNTLYLQMNSLRAEDTAVYYCAKDIRGAYSSGLFDHWGRGTLVTVSS

SEQ ID NO: 1863 - protein, 122 aa, Artificial Sequence
  Description of Artificial Sequence: Synthetic polypeptide
EVQLLESGGGLVQPGGSLRLSCAASGFTFSHYWMQWVRQAPGKGLEWVSGIVPSGGLTMYADSVKGRFTISRDNSKNTLYLQMNSLRAEDTAVYYCARDIMGAYASGLFHNWGRGTLVTVSS

SEQ ID NO: 1864 - protein, 122 aa, Artificial Sequence
  Description of Artificial Sequence: Synthetic polypeptide
EVQLLESGGGLVQPGGSLRLSCAASGFTFSEYWMTWVRQAPGKGLEWVSGISPSGGMTFYADSVKGRFTISRDNSKNTLYLQMNSLRAEDTAVYYCAKDIRGAYSSGLFDFWGRGTLVTVSS

SEQ ID NO: 1865 - protein, 122 aa, Artificial Sequence
  Description of Artificial Sequence: Synthetic polypeptide
EVQLLESGGGLVQPGGSLRLSCAASGFTFSPYWMSWVRQAPGKGLEWVSGISPSGGITFYADSVKGRFTISRDNSKNTLYLQMNSLRAEDTAVYYCARDIWGAYSAGHFEYWGRGTLVTVSS

SEQ ID NO: 1866 - protein, 122 aa, Artificial Sequence
  Description of Artificial Sequence: Synthetic polypeptide
EVQLLESGGGLVQPGGSLRLSCAASGFTFSWYWMHWVRQAPGKGLEWVSGIVSSGGTTIYADSVKGRFTISRDNSKNTLYLQMNSLRAEDTAVYYCARDLSGEYASGLFGYWGRGTLVTVSS

SEQ ID NO: 1867 - protein, 122 aa, Artificial Sequence
  Description of Artificial Sequence: Synthetic polypeptide
EVQLLESGGGLVQPGGSLRLSCAASGFTFSWYWMVWVRQAPGKGLEWVSSIGPSGGDTYYADSVKGRFTISRDNSKNTLYLQMNSLRAEDTAVYYCARDMRGAYASGLFDYWGRGTLVTVSS

SEQ ID NO: 1868 - protein, 122 aa, Artificial Sequence
  Description of Artificial Sequence: Synthetic polypeptide
EVQLLESGGGLVQPGGSLRLSCAASGFTFSWYNMSWVRQAPGKGLEWVSRISPSGGDTGYADSVKGRFTISRDNSKNTLYLQMNSLRAEDTAVYYCAKDIRGAYSSGLFDHWGRGTLVTVSS

SEQ ID NO: 1869 - protein, 122 aa, Artificial Sequence
  Description of Artificial Sequence: Synthetic polypeptide
EVQLLESGGGLVQPGGSLRLSCAASGFTFSPYWMHWVRQAPGKGLEWVSGIGPSGGPTFYADSIKGRFTISRDNSKNTLYLQMNSLRAEDTAVYYCAKDIRGAYSGGLFDYWGRGTLVTVSS

SEQ ID NO: 1870 - protein, 108 aa, Artificial Sequence
  Description of Artificial Sequence: Synthetic polypeptide
QDIQMTQSPGTLSLSPGERATLSCRASQSVSSYLAWYQQKPGQAPRLLIYDASNRATGIPARFSGSGSGTDFTLTISSLEPEDFAVYYCQQRSNWPITFGQGTRLEIK

SEQ ID NO: 1871 - protein, 108 aa, Artificial Sequence
  Description of Artificial Sequence: Synthetic polypeptide
QDIQMTQSPSSVSASVGDRVTITCRASQSISSWLAWYQQKPGKAPKLLISTASNLQSGVPSRFSGSGSGTDFTLTISSLQPEDFATYYCQQVSNFPITFGQGTRLEIK

SEQ ID NO: 1872 - protein, 108 aa, Artificial Sequence
  Description of Artificial Sequence: Synthetic polypeptide
QDIQMTQSPATLSLSPGERATLSCRASQSVSSYLAWYQQKPGQAPRLLIYDASNRATGIPARFSGSGSGTDFTLTISSLEPEDFAVYYCQHNEGWPWTFGQGTKVEVK

SEQ ID NO: 1873 - protein, 109 aa, Artificial Sequence
  Description of Artificial Sequence: Synthetic polypeptide
QDIQMTQSPSSLSASVGDRVTITCQASQDISNYLNWYQQKPGKAPKLLIYAASKLEDGVPSRFSGSGTGTDFTLTIRSLQPEDFASYFCQQSYSSPGITFGPGTKVEIK

SEQ ID NO: 1874 - protein, 108 aa, Artificial Sequence
  Description of Artificial Sequence: Synthetic polypeptide
QDIQMTQSPSSFSASTGDRVTITCRASQGISSYLAWYQQKPGKAPKLLIYAASTLQSGVPSRFSGSGSGTHYTLTINSLQPEDFATYYCQQANSFPLTFGGGTKVEIK

SEQ ID NO: 1875 - protein, 110 aa, Artificial Sequence
  Description of Artificial Sequence: Synthetic polypeptide
QSVLTQPPSASGTPGQRVTISCSGSSSNIGSNTVNWYQQLPGTAPKLLIYSNNQRPSGVPDRFSGSKSGTSAPLAISGLQFEDEADYYCAVWDDSLNGWVFGGGTKLTVL

SEQ ID NO: 1876 - protein, 109 aa, Artificial Sequence
  Description of Artificial Sequence: Synthetic polypeptide
QDIQMTQSPGTLSLSPGERAALSCRASQSVSSNYLAWYQQKPGQAPRLLMYGASNRATGIPDRFSGSGSGTDFTLTISRLEPEDFAVYYCQQYGRSPRTFGQGTKLEIK

SEQ ID NO: 1877 - protein, 109 aa, Artificial Sequence
  Description of Artificial Sequence: Synthetic polypeptide
QDIQMTQSPGILSLSPGDRATLSCRASQSVTSSSLAWYQQRPGQSPRLLIYGASSRATGIPDRFSGSGSGTDFTLIISRLEPEDFASYYCQQYGGSPITFGPGTKVDIK

SEQ ID NO: 1878 - protein, 108 aa, Artificial Sequence
  Description of Artificial Sequence: Synthetic polypeptide
QDIQMTQSPSSVSASVGDRVTITCRASQDVGSWLAWYQQKPGKAPKLLIFAASSLESGIPSRFSGSGSGTDFTLTISSLQPEDFATYYCQQANGFPLTFGGGTKVEIK

SEQ ID NO: 1879 - protein, 110 aa, Artificial Sequence
  Description of Artificial Sequence: Synthetic polypeptide
QDIQMTQSPGTLSLSPGERATLSCRASQSVSSSYLAWYQQKPGQAPRLLIYGASSRATGIPDRFSGSGSGTDFTLTISRLEPEDFAVYYCQQYGSSPPITFGQGTRLEIK

SEQ ID NO: 1880 - protein, 109 aa, Artificial Sequence
  Description of Artificial Sequence: Synthetic polypeptide
QDIQMTQSPATLSLSPGERATLSCRASQSVDHFLAWYQQKPGQAPRLLIYGATNRATGVPARFNGTGSGTDFTLTISSLEPEDFAVYYCQQRLNWPPWTFGQGTKVEIK

SEQ ID NO: 1881 - protein, 104 aa, Artificial Sequence; identical to SEQ ID NO: 608
  Description of Artificial Sequence: Synthetic polypeptide

SEQ ID NO: 1882 - protein, 110 aa, Artificial Sequence
  Description of Artificial Sequence: Synthetic polypeptide
QYELTQPPSASGTPGQTVTISCSGSTSNIGSNTVAWYQQVPGTAPKLLIHTNNQRPSGVSDRFSGSKSVASASLAINGLQSEDEADYYCAGWDDSLNGAVFGGGTKVTVL

SEQ ID NO: 1883 - protein, 108 aa, Artificial Sequence
  Description of Artificial Sequence: Synthetic polypeptide
QDIQMTQSPSFLSASVGDRVTITCRASQGISSYLAWYQQKPGKAPKLLIYGASTLQSGVPSRFSGSGSGTDFTLTISSLQPEDFATYYCQQSYTTPYTFGQGTKLEIK

SEQ ID NO: 1884 - protein, 109 aa, Artificial Sequence
  Description of Artificial Sequence: Synthetic polypeptide
QDIQMTQSPGTLSLSPGERATLSCRASQSVSGSYLAWYQQKPGQAPRLLIYGASSRATGIPDRFSGSGSGTDFTLTITRLEPEDFAVYYCQQYGSSPRTFGQGTKVEIK

SEQ ID NO: 1885 - protein, 108 aa, Artificial Sequence
  Description of Artificial Sequence: Synthetic polypeptide
QDIQMTQSPSSLSASVGDRVTITCRTGQSFSNFLNWYQQKPGTAPNLLIYLASNLQSGVPSRFSGSRSGTDFTLTISSLQPEDSAIYYCQQSHSLPWTFGQGTKVEIK

SEQ ID NO: 1886 - protein, 109 aa, Artificial Sequence
  Description of Artificial Sequence: Synthetic polypeptide
QDIQMTQSPGTLSLSPGQRATLSCRASQTVNSNYIAWYQQRPGQAPRLLIYAASSRATGIPDRFSGSGSGTDFTLTIRSLEPEDFAVYYCQKYGRSPQTFGQGTKVEIK

SEQ ID NO: 1887 - protein, 111 aa, Artificial Sequence
  Description of Artificial Sequence: Synthetic polypeptide
QSALTQPPSTSGTPGQRVTISCSGSGSNIGSNPVNWYQQLPGAAPKLLIYSNDLRPSGVPDRFSGSKSGTSASLAISGLQSEDEADYYCAAWDYSLNGPWVFGGGTKLTVL

SEQ ID NO: 1888 - protein, 109 aa, Artificial Sequence
  Description of Artificial Sequence: Synthetic polypeptide
QDIQMTQSPATLSLSPGERATLSCRASQSVSSNLAWYQQKPGQAPRLLIYDASNRATGIPARFSGSGSGTDFTLTISSLEPEDFAVYYCQQRSNWPPLTFGGGTKVEIK

SEQ ID NO: 1889 - protein, 108 aa, Artificial Sequence
  Description of Artificial Sequence: Synthetic polypeptide
QDIQMTQSPATLSLSPGERATLSCRASQSVSSYLAWYQQKPGQAPRLLIYDASNRATGIPARFSGSGSGTDFTLTISSLEPEDFAVYYCQQRSNWPLTFGGGTKVEIK

SEQ ID NO: 1890 - protein, 109 aa, Artificial Sequence
  Description of Artificial Sequence: Synthetic polypeptide
QDIQMTQSPGTLSLSPGERATLSCRASQSVSSNYLAWYQQKPGQAPRLLIYGASSRATGISDRFSGSGSGTDFTLTISRLEPEDFAVYYCQQYGTSPETFGGGTKVEIK

SEQ ID NO: 1891 - protein, 108 aa, Artificial Sequence
  Description of Artificial Sequence: Synthetic polypeptide
QDIQMTQSPSSLSASVGDRVTITCRASQGISNYLAWYQQKPGKVPKLLIYAASTLQSGVPSRFSGSGSGTDFTLTISSLQPEDVATYYCQKYNSAPFTFGPGTKVDIK

SEQ ID NO: 1892 - protein, 107 aa, Artificial Sequence
  Description of Artificial Sequence: Synthetic polypeptide
QYELTQPPSVSVSPGQTASITCSGDKLGDKYASWYQQKPGQSPVLVVYHDTRRPSGIPERFSGSNSGNTATLTISGTQAMDEADYYCQAWDDITAVVFGGGTKLTVL

SEQ ID NO: 1893 - protein, 110 aa, Artificial Sequence
  Description of Artificial Sequence: Synthetic polypeptide
QSELTQPRSVSGSPGQSVTISCTGTSNDVGEYNYVSWYQQHPGKAPKVMIYDVTRRPSGVPDRFSGSKSGNTASLTISGLQADDEAHYYCCSYAGRYTYVFGSGTNVTVL

SEQ ID NO: 1894 - protein, 109 aa, Artificial Sequence
  Description of Artificial Sequence: Synthetic polypeptide
QDIQMTQSPGTLSLSSGERATLSCRASQSVSSNYLAWYQQKRGQAPRLLIYGASSRATGVPGRFSGSGSGTDFTLTISRLEPEDFAVYYCQQYGSSPRTFGQGTKLEIK

SEQ ID NO: 1895 - protein, 113 aa, Artificial Sequence
  Description of Artificial Sequence: Synthetic polypeptide
QDIQMTQSPLSLPVTPGEPASISCRSSQSLLHSNGYNYLDWYLQKPGQSPQLLIYLGSNRASGVPDRFSGSGSGTDFTLKISRVEAEDVGVYYCMQALQTPYTFGQGTKLEIK

SEQ ID NO: 1896 - protein, 108 aa, Artificial Sequence
  Description of Artificial Sequence: Synthetic polypeptide
QDIQMTQSPSSLSASVGDRVTITCRASQSISIYLNWYQQKAGKAPKLLIYAASNLQSGVPSRFSGSGSGTDFTLTISSLQPEDFATYFCQQSYLPPLTFGGGTTVEIK

SEQ ID NO: 1897 - protein, 110 aa, Artificial Sequence
  Description of Artificial Sequence: Synthetic polypeptide
QDIQMTQSPSSLSASVGDRVTIACRASRGITTALGWYQQKSGTPPKLLIYDASYLDSGVPSRFSGSGSGTDFTLTINSVQPEDFATYYCQQFMTYPQGISFGQGTRLEIK

SEQ ID NO: 1898 - protein, 110 aa, Artificial Sequence
  Description of Artificial Sequence: Synthetic polypeptide
QSELTQPASVSGSPGQSITISCTGTSSDIGGYDYVSWYQQYPGKAPKLMIYHVSNRPSGVSTRFSGSKSANTASLTISGLQAEDEADYYCSSYTSSSTYVFGTGTKVTVL

SEQ ID NO: 1899 - protein, 109 aa, Artificial Sequence
  Description of Artificial Sequence: Synthetic polypeptide
QDIQMTQSPSSLSASVGDRVTITCRASQSISTKLNWYQQKPGKAPNLLIYDTSTLQSGVPSRFSGSGSGTDFTLTISSLQLEDFASYYCQQTYGALTWTFGQGTKVEIK

SEQ ID NO: 1900 - protein, 108 aa, Artificial Sequence
  Description of Artificial Sequence: Synthetic polypeptide
QDIQMTQSPGTLSLSPGERATLSCRASQSVSSSYAAWYQLKPGQAPRLLIYGVSRRATGIPDRFSGSGSGTDFTLTISRLEPEDFAVYYCQQFGSSPTFGQGTKVEIK

SEQ ID NO: 1901 - protein, 109 aa, Artificial Sequence
  Description of Artificial Sequence: Synthetic polypeptide
QDIQMTQSPDSLSASVGDRVTITCRASQSISSYLNWYQQKPGKAPKLLIYAASSLQSGVPSRFSGSGSGTDFTLTISSLQPEDFATYYCQQSYSSPGITFGPGTKVEIK

SEQ ID NO: 1902 - protein, 110 aa, Artificial Sequence
  Description of Artificial Sequence: Synthetic polypeptide
QDIQMTQSPGTLSLSPGERATLSCRASQSVSSSYLAWYQQKPGQAPRLLIYGASSRATGIPDRFSGSGSGTDFTLTISRLEPEDFAVYYCQQYGSSLALTFGGGTKVEIK

SEQ ID NO: 1903 - protein, 110 aa, Artificial Sequence
  Description of Artificial Sequence: Synthetic polypeptide
QDIQMTQSPSSLSASVGDRVTITCRASQSISGSLNWYQQKPGKAPKLLIYAASILQSGVPSRFSGSGSGTDFTLTISSLQPEDFATYYCQQNYDLFGGLTFGPGTKVDVK

SEQ ID NO: 1904 - protein, 107 aa, Artificial Sequence
  Description of Artificial Sequence: Synthetic polypeptide
QDIQMTQSPSSLSASVGDRVTITCRTSQDFSNNLAWYQQRPGKAPKLLIYAASTLQSGVPSRFSGSGSGTDFTLTISSLQPEDVATYYCQRYDNGPLFGPGTKVHVK

SEQ ID NO: 1905 - protein, 104 aa, Artificial Sequence
  Description of Artificial Sequence: Synthetic polypeptide
QDIQMTQSPGTLSVSPGERATLSCRASQSVSSNLAWYQQKPGQAPRLLIYGASTRATGIPARFSGSGSGTEFTLTISSLQSEDFAVYYCQLYKTFGGGTKVEIK

SEQ ID NO: 1906 - protein, 109 aa, Artificial Sequence
  Description of Artificial Sequence: Synthetic polypeptide
QDIQMTQSPGTLSLSPGERATLSCRASQSVSSSYLAWYQQKPGQAPRLLIYGASSRATGIPDRFSGSGSGTDFTLTISRLEPEDFAVYYCQQYGSSPRTFGQGTKLEIK

SEQ ID NO: 1907 - protein, 108 aa, Artificial Sequence
  Description of Artificial Sequence: Synthetic polypeptide
QDIQMTQSPSSLSASVGDRVTITCRASQSISSYLNWYQQKPGKAPKLLIYAASSLQIGVPSRFSGSGSGTDFTLTISSLQPEDFATYYCQQSYITPLTFGPGTKVDIK

SEQ ID NO: 1908 - protein, 108 aa, Artificial Sequence
  Description of Artificial Sequence: Synthetic polypeptide
QDIQMTQSPSSLSASVGDRVTITCRANQGISNYLAWFQQKPGKAPKSLIYAASSLQSGVPSKFSGSGSGTDFTLTISSLQPEDSATYYCQQYNSFPLTFGGGTKVEIK

SEQ ID NO: 1909 - protein, 108 aa, Artificial Sequence
  Description of Artificial Sequence: Synthetic polypeptide
QDIQMTQSPATLSLSPGERATLSCRASQSVSSYLAWYQQKPGQAPRLLIYDASYRATGIPARFGGSGSGTDFTLTISSLEPEDFALYYCQQRSDWPRTFGQGTKLEIK

SEQ ID NO: 1910 - protein, 112 aa, Artificial Sequence
  Description of Artificial Sequence: Synthetic polypeptide
QSALTQPASVSGSPGQSITISCTGTSSDVGGYNYVSWYQQHPGKAPKLMIYDVSNRPSGVSNRFSGSKSGNTASLTISGLQAEDEADYYCSSYTSSSTLDVVFGGGTKLTVL

SEQ ID NO: 1911 - protein, 111 aa, Artificial Sequence
  Description of Artificial Sequence: Synthetic polypeptide
QSELTQPPSVSGSPRQSVTISCTGTTSDIGGYNHVSWYQHHPGKAPQLLIYDVTRRPSGVPDRFSASKSGNTASLTISGLQAEDEAVYYCSSYGGSYSFHVFGTGTQVTVL

SEQ ID NO: 1912 - protein, 110 aa, Artificial Sequence
  Description of Artificial Sequence: Synthetic polypeptide
QDIQMTQSPGTLSLSPGETATLSCWASQSVAWYQQKPGQPPRLLIYDVSTRATGIPDRFSGSGSGTGSTLTISRLEPEDFAVYFCQQYGYSPLSFDGGTKVEIKRTVAAP

SEQ ID NO: 1913 - protein, 107 aa, Artificial Sequence
  Description of Artificial Sequence: Synthetic polypeptide
QSELTQDPAVSVALGQTVRITCRGDRLRTYYSSWYQQKPRQAPVLVMFGRNNRPSGIPDRFSGSTSGGTASLTITATQADDEADYFCSSRDGSGNFLFGGGTKLTVL

SEQ ID NO: 1914 - protein, 108 aa, Artificial Sequence
  Description of Artificial Sequence: Synthetic polypeptide
QDIQMTQSPLSLSASVGDRVTITCRASQSISSYLNWYQQKPGKAPKLLIYAASSLQSGVPSRFSGSGSGTDFTLTISSLQPEDFATYYCQQSYSTPYTFGQGTKLEIK

SEQ ID NO: 1915 - protein, 111 aa, Artificial Sequence
  Description of Artificial Sequence: Synthetic polypeptide
QSELTQPASVSGSPGQSVTISCSGISYDLYDYIYVSWYQQHPDKAPQLLLYDVDKRPSGISDRFSGSKSGDTASLTISGLRTDDEAEYYCSSFTRTTTVYVFGTGTKVTVL

SEQ ID NO: 1916 - protein, 109 aa, Artificial Sequence
  Description of Artificial Sequence: Synthetic polypeptide
QDIQMTQSPSSLSASVGDRVTITCRASQSISSYLNWYQQKPGKAPKLLIYAASKLEDGVPSRFSGSGTGTDFTLTIRSLQPEDFASYFCQQSYSSPGITFGPGTKVEIK

SEQ ID NO: 1917 - protein, 109 aa, Artificial Sequence
  Description of Artificial Sequence: Synthetic polypeptide
QDIQMTQSPGTLSLSPGERATLSCRASQSVSSSYLAWYQQKPGQAPRLLIYGASSRATGIPDRFSGSGSGTDFTLTISRLEPEDIAVYYCQQYGSSAWTFGQGTKVEIK

SEQ ID NO: 1918 - protein, 110 aa, Artificial Sequence
  Description of Artificial Sequence: Synthetic polypeptide
QDIQMIQSPSSLSASVGDSVTITCRASQNINIYLNWYQQKPGKAPKLLISAASSLQSGVPSRFSGSGSGTDFTLTITDLQPEDLATYYCQQTYSAPPPWTFGPGTKVDIK

SEQ ID NO: 1919 - protein, 108 aa, Artificial Sequence
  Description of Artificial Sequence: Synthetic polypeptide
QDIQMTQSPATLSLSPGERATLSCRASQSVSRYLAWYQQKPGQAPRLLIYGASSRVHGIPDRFSGSGSGTDFTLTISRLEPEDFAVYYCQQYGGSPTTFGGGTKVEIK

SEQ ID NO: 1920 - protein, 113 aa, Artificial Sequence
  Description of Artificial Sequence: Synthetic polypeptide
QDIQMTQSPLSLPVTLGQPASISCRSSQSLVYINGNTYLNWFQQRPGQSPRRLIYNVSNRDSGVPERFSGSGSGTDFTLKISRVEAEDVGVYYCMQGTHWPPAFGQGTKVEIK

SEQ ID NO: 1921 - protein, 111 aa, Artificial Sequence
  Description of Artificial Sequence: Synthetic polypeptide
QDIQMTQSPGTLSLSPGERATLSCRASQSVSSSYLAWYQQKPGQAPRLLIYGASSRATGIPDRFSGSGSGTDFTLTISRLEPEDFAVYYCQQYGSSPPMYTFGQGTKLEIK

SEQ ID NO: 1922 - protein, 109 aa, Artificial Sequence
  Description of Artificial Sequence: Synthetic polypeptide
QDIQMTQSPSSLSASVGDRVAITCRASQSIDTYLNWYQQKPGKAPKLLIYAASKLEDGVPSRFSGSGTGTDFTLTIRSLQPEDFASYFCQQSYSSPGITFGPGTKVEIK

SEQ ID NO: 1923 - protein, 110 aa, Artificial Sequence
  Description of Artificial Sequence: Synthetic polypeptide
QSALTQPASVSGSPGQSITISCTGTSTDVGGYKYVSWYQQHPGKAPKLVIYEVSNRPSGVSNRFSGSKSGNTASLTISGLQAEDEADYYCSSYTSSTTVVFGGGTKLTVL

SEQ ID NO: 1924 - protein, 110 aa, Artificial Sequence
  Description of Artificial Sequence: Synthetic polypeptide
QSELTQPPSASGTPGQRVTISCSGSSSNIGTNTVNWYQQLPGMAPKVVMSANNERPSGVPDRFSGSKTGTSASLAISGLQSEDEADYYCAAWDENLSGPVFGTGTKVTVL

SEQ ID NO: 1925 - protein, 108 aa, Artificial Sequence
  Description of Artificial Sequence: Synthetic polypeptide
QDIQMTQSPATLSLSPGERATLSCRASQNVYSRLAWYQQKPGQAPRLLIYGASTRATGIPDRFSGSGSGTDFTLTISRLEPEDFALYYCQQYGSSPRTFGQGTKLEIR

SEQ ID NO: 1926 - protein, 110 aa, Artificial Sequence
  Description of Artificial Sequence: Synthetic polypeptide
QDIQMTQSPGTLSLSPGERATLSCRASQTISSNQLAWYQQQKPGQAPRLLVYGAFSTATGIPDRFIGGGSGTDFTLTISRLEPEDFAVYYCQQYGSSPLTFGGGTKVEIK

SEQ ID NO: 1927 - protein, 108 aa, Artificial Sequence
  Description of Artificial Sequence: Synthetic polypeptide
QDIQMTQSPGTLSLSPGESATLSCRASHSVDRLYLAWYQQKPGQAPRLLIYGTSSRATGIPDRVSGSGSGTDFTLTISRLEREDSAVYYCQHYGSLWTFGQGTKVEIK

SEQ ID NO: 1928 - protein, 108 aa, Artificial Sequence
  Description of Artificial Sequence: Synthetic polypeptide
QDIQMTQSPSSLSASVGDRVTITCRASQRIASYLNWYQQKPGKAPKLLIYAASSLQSGVPSRFSGSGSGTDFTLTVSSLQPEDFATYYCQQSYSAPLTFGGGTKVEIK

SEQ ID NO: 1929 - protein, 104 aa, Artificial Sequence
  Description of Artificial Sequence: Synthetic polypeptide
QDIQMTQSPSSLSASVGDRVTITCRASQSISSYLNWYQQKPGKAPKLLIYAASSLQSGVPSRFSGSGSGTDFTLTISSLQPEDFATYYCQSGLTFGGGTKVEIK

SEQ ID NO: 1930 - protein, 108 aa, Artificial Sequence
  Description of Artificial Sequence: Synthetic polypeptide
QDIQMTQSPSSLSASVGDRVTITCRASQSISSYLNWYQQKPGKAPKLLIYAASSLQSGVPSRFSGSGSGTDFTLTISSLQPEDFATYYCQQSYSTPYTFGQGTKLEIK

SEQ ID NO: 1931 - protein, 110 aa, Artificial Sequence
  Description of Artificial Sequence: Synthetic polypeptide
QSVLTQPASVSGSPGQSITISCTGTSTDVGGYNYVSWYQKHPGKAPKLMIYDVSNRPSGVSNRFSGSKSGNTASLTISGLQAEDEADYYCSSYTNTITVVFGGGTKLTVL

SEQ ID NO: 1932 - protein, 108 aa, Artificial Sequence
  Description of Artificial Sequence: Synthetic polypeptide
QDIQMTQSPSSLSASVGDRVTITCRASQGIRNDLGWYQQKPGKAPKLLIYAASSLQSGVPSRFSGSGFGTDFTLTISSLQPEDFATYYCLQDYRYPLTFGGGTKVEIK

SEQ ID NO: 1933 - protein, 109 aa, Artificial Sequence; identical to SEQ ID NO: 1922
  Description of Artificial Sequence: Synthetic polypeptide

SEQ ID NO: 1934 - protein, 107 aa, Artificial Sequence
  Description of Artificial Sequence: Synthetic polypeptide
QDIQMTQSPSSLSASVGDRVTITCRASQSISSYLNWYQQKPGKAPKLLIYAASKLEDGVPSRFSGSGTGTDFTLTINSLQPEDFATYYCQQSYNTPSFGPGTRVDVK

SEQ ID NO: 1935 - protein, 108 aa, Artificial Sequence
  Description of Artificial Sequence: Synthetic polypeptide
QDIQMTQSPATLSASVGDRVTITCRASQRISSYLNWYQQKPGKAPKLLIYAASSLQSGVPSRFSGSGSGTDFTLTISSLQPEDFATYYCQQSYSTPRTFGQGTKVEIK

SEQ ID NO: 1936 - protein, 108 aa, Artificial Sequence
  Description of Artificial Sequence: Synthetic polypeptide
QDIQMTQSPSSLSASVGDRVTITCRASQDISSWLVWYQQKPGKAPKVLIYAASSLQSGIPSRFSGSGSGTDFTLTISSLQPEDFATYYCQQANRFPLTFGGGTKVEIK

SEQ ID NO: 1937 - protein, 108 aa, Artificial Sequence
  Description of Artificial Sequence: Synthetic polypeptide
QDIQMTQSPATLSVSPGERATLSCRASQSVSSSLAWYQQKPGQAPRLLISETSNRATAIPAKFSGSGFGTDFTLTISSLEPEDSAVYYCQQHVSWPLTFGGGTKVEIK

SEQ ID NO: 1938 - protein, 111 aa, Artificial Sequence
  Description of Artificial Sequence: Synthetic polypeptide
QSALTQPPSVSGAPGQTVTISCTGTSSNIGTGYAVHWYQHLPGKAPKPLFSGDDNRPSGVPDRFSASKSGTSASLAIARLQTEDEADYYCESYDYKLGGWVFGGGTKLTVL

SEQ ID NO: 1939 - protein, 120 aa, Artificial Sequence
  Description of Artificial Sequence: Synthetic polypeptide
EVQLLESGGGLVQPGGSLRLSCAASGFTFSYYKMHWVRQAPGKGLEWVSWIGPSGGITDYADSVKGRFTISRDNSKNTLYLQMNSLRAEDTAVYYCTTDDISDYYGMDVWGQGTTVTVSS

SEQ ID NO: 1940 - protein, 121 aa, Artificial Sequence
  Description of Artificial Sequence: Synthetic polypeptide
EVQLLESGGGLVQPGGSLRLSCAASGFTFSWYPMNWVRQAPGKGLEWVSVIWPSGGETAYADSVKGRFTISRDNSKNTLYLQMNSLRAEDTAVYYCTTGRFYGYYRDFDYWGQGTLVTVSS

SEQ ID NO: 1941 - protein, 129 aa, Artificial Sequence
  Description of Artificial Sequence: Synthetic polypeptide
EVQLLESGGGLVQPGGSLRLSCAASGFTFSWYDMLWVRQAPGKGLEWVSYISPSGGYTLYADSVKGRFTISRDNSKNTLYLQMNSLRAEDTAVYYCTTVPTPYTYCSGGSCYRDAFDIWGQGTMVTVSS

SEQ ID NO: 1942 - protein, 126 aa, Artificial Sequence
  Description of Artificial Sequence: Synthetic polypeptide
EVQLLESGGGLVQPGGSLRLSCAASGFTFSYYPMYWVRQAPGKGLEWVSVIGSSGGNTSYADSVKGRFTISRDNSKNTLYLQMNSLRAEDTAVYYCAGAHYDFWSDYYGPDAFDIWGQGTMVTVSS

SEQ ID NO: 1943 - protein, 118 aa, Artificial Sequence
  Description of Artificial Sequence: Synthetic polypeptide
EVQLLESGGGLVQPGGSLRLSCAASGFTFSWYLMGWVRQAPGKGLEWVSSIYPSGGITNYADSVKGRFTISRDNSKNTLYLQMNSLRAEDTAVYYCARGGGADAFDIWGQGTMVTVSS

SEQ ID NO: 1944 - protein, 133 aa, Artificial Sequence
  Description of Artificial Sequence: Synthetic polypeptide
EVQLLESGGGLVQPGGSLRLSCAASGFTFSRYHMTWVRQAPGKGLEWVSSISPSGGPTYYADSVKGRFTISRDNSKNTLYLQMNSLRAEDTAVYYCAKGVRSYYDFWSGYSLYYYYYYGMDVWGQGTTVTVSS

SEQ ID NO: 1945 - protein, 126 aa, Artificial Sequence
  Description of Artificial Sequence: Synthetic polypeptide
EVQLLESGGGLVQPGGSLRLSCAASGFTFSGYNMVWVRQAPGKGLEWVSIVSSGGLTDYADSVKGRFTISRDNSKNTLYLQMNSLRAEDTAVYYCAKGLYYYDSSGYYYGGAFDIWGQGTMVTVSS

SEQ ID NO: 1946 - protein, 126 aa, Artificial Sequence
  Description of Artificial Sequence: Synthetic polypeptide
EVQLLESGGGLVQPGGSLRLSCAASGFTFSTYQMWWVRQAPGKGLEWVSGISSSGGATGYADSVKGRFTISRDNSKNTLYLQMNSLRAEDTAVYYCTRVPHYYDSSGYYGGLVDYWGQGTLVTVSS

SEQ ID NO: 1947 - protein, 124 aa, Artificial Sequence
  Description of Artificial Sequence: Synthetic polypeptide
EVQLLESGGGLVQPGGSLRLSCAASGFTFSRYLMHWVRQAPGKGLEWVSSISSSGGETDYADSVKGRFTISRDNSKNTLYLQMNSLRAEDTAVYYCAHGAPLGDYYYYYGMDVWGQGTTVTVSS

SEQ ID NO: 1948 - protein, 120 aa, Artificial Sequence
  Description of Artificial Sequence: Synthetic polypeptide
EVQLLESGGGLVQPGGSLRLSCAASGFTFSRYGMTWVRQAPGKGLEWVSGISPSGGNTWYADSVKGRFTISRDNSKNTLYLQMNSLRAEDTAVYYCTSHDYGDHYGMDVWGQGTLVTVSS

SEQ ID NO: 1949 - protein, 120 aa, Artificial Sequence
  Description of Artificial Sequence: Synthetic polypeptide
EVQLLESGGGLVQPGGSLRLSCAASGFTFSGYDMKWVRQAPGKGLEWVSYISSSGGPTVYADSVKGRFTISRDNSKNTLYLQMNSLRAEDTAVYYCATELYDSSGYLSLWGQGTLVTVSS

SEQ ID NO: 1950 - protein, 122 aa, Artificial Sequence; identical to SEQ ID NO: 670
  Description of Artificial Sequence: Synthetic polypeptide

SEQ ID NO: 1951 - protein, 116 aa, Artificial Sequence
  Description of Artificial Sequence: Synthetic polypeptide
EVQLLESGGGLVQPGGSLRLSCAASGFTFSQYPMVWVRQAPGKGLEWVSSIYPSGGYTIYADSVKGRFTISRDNSKNTLYLQMNSLRAEDTAVYYCARGGGNFDYWGQGTLVTVSS

SEQ ID NO: 1952 - protein, 120 aa, Artificial Sequence
  Description of Artificial Sequence: Synthetic polypeptide
EVQLLESGGGLVQPGGSLRLSCAASGFTFSWYNMFWVRQAPGKGLEWVSYISPSGGPTDYADSVKGRFTISRDNSKNTLYLQMNSLRAEDTAVYYCASEYRGNYYGMDVWGQGTTVTVSS

SEQ ID NO: 1953 - protein, 120 aa, Artificial Sequence
  Description of Artificial Sequence: Synthetic polypeptide
EVQLLESGGGLVQPGGSLRLSCAASGFTFSMYYMMWVRQAPGKGLEWVSGIYPSGGPTGYADSVKGRFTISRDNSKNTLYLQMNSLRAEDTAMYYCASNDYGYYYGMDVWGQGTTVTVSS

SEQ ID NO: 1954 - protein, 118 aa, Artificial Sequence
  Description of Artificial Sequence: Synthetic polypeptide
EVQLLESGGGLVQPGGSLRLSCAASGFTFSYYHMHWVRQAPGKGLEWVSGIGPSGGMTYYADSVKGRFTISRDNSKNTLYLQMNSLRAEDTAVYYCARFNYYYGLDVWGQGTTVTVSS

SEQ ID NO: 1955 - protein, 120 aa, Artificial Sequence
  Description of Artificial Sequence: Synthetic polypeptide
EVQLLESGGGLVQPGGSLRLSCAASGFTFSHYQMDWVRQAPGKGLEWVSGISSSGGNTQYADSVKGRFTISRDNSKNTLYLQMNSLRAEDTAVYYCASQDYGRYYGMDVWGQGTTVTVSS

SEQ ID NO: 1956 - protein, 119 aa, Artificial Sequence
  Description of Artificial Sequence: Synthetic polypeptide
EVQLLESGGGLVQPGGSLRLSCAASGFTFSVYPMQWVRQAPGKGLEWVSGISSSGGFTMYADSVKGRFTISRDNSKNTLYLQMNSLRAEDMAVYYCARGGDSLYGMDVWGQGTHGHRLK

SEQ ID NO: 1957 - protein, 124 aa, Artificial Sequence
  Description of Artificial Sequence: Synthetic polypeptide
EVQLLESGGGLVQPGGSLRLSCAASGFTFSWYEMTWVRQAPGKGLEWVSYIGPSGGRTVYADSVKGRFTISRDNSKNTLYLQMNSLRAEDTAVYYCALVSQGEISGLPYGMDVWGQGTTVTVSS

SEQ ID NO: 1958 - protein, 120 aa, Artificial Sequence
  Description of Artificial Sequence: Synthetic polypeptide
EVQLLESGGGLVQPGGSLRLSCAASGFTFSYYLMNWVRQAPGKGLEWVSSIGSSGGFTYYADSVKGRFTISRDNSKNTLYLQMNSLRAEDTATYYCASNDYGYYYGMDVWGQGTTVTVSS

SEQ ID NO: 1959 - protein, 120 aa, Artificial Sequence
  Description of Artificial Sequence: Synthetic polypeptide
EVQLLESGGGLVQPGGSLRLSCAASGFTFSRYNMVWVRQAPGKGLEWVSSISSSGGRTKYADSVKGRFTISRDNSKNTLYLQMNSLRAEDTAVYYCVTLDLGYYYGMDVWGQGTTVTVSS

SEQ ID NO: 1960 - protein, 125 aa, Artificial Sequence
  Description of Artificial Sequence: Synthetic polypeptide
EVQLLESGGGLVQPGGSLRLSCAASGFTFSSYDMTWVRQAPGKGLEWVSGIVSSGGLTAYADSVKGRFTISRDNSKNTLYLQMNSLRAEDTAVYYCAKFNADFWSGYYNLGLDYWGQGTLVTVSS

SEQ ID NO: 1961 - protein, 127 aa, Artificial Sequence
  Description of Artificial Sequence: Synthetic polypeptide
EVQLLESGGGLVQPGGSLRLSCAASGFTFSYYQMNWVRQAPGKGLEWVSVISPSGGITIYADSVKGRFTISRDNSKNTLYLQMNSLRAEDTAVYYCATANGYYDSSGYYYKDAFDIWGQGTMVTVSS

SEQ ID NO: 1962 - protein, 127 aa, Artificial Sequence
  Description of Artificial Sequence: Synthetic polypeptide
EVQLLESGGGLVQPGGSLRLSCAASGFTFSWYGMTWVRQAPGKGLEWVSRIYSSGGQTMYADSVKGRFTISRDNSKNTLYLQMNSLRAEDTAVYYCAREAGIAAAGSYYYYYGMDVWGQGTTVTVSS

SEQ ID NO: 1963 - protein, 120 aa, Artificial Sequence
  Description of Artificial Sequence: Synthetic polypeptide
EVQLLESGGGLVQPGGSLRLSCAASGFTFSHYWMHWVRQAPGKGLEWVSSISSSGGMTYYADSVKGRFTISRDNSKNTLYLQMNSLRAEDTAVYYCTTADYGYYYGMDVWGQGTTVTVSS

SEQ ID NO: 1964 - protein, 122 aa, Artificial Sequence
  Description of Artificial Sequence: Synthetic polypeptide
EVQLLESGGGLVQPGGSLRLSCAASGFTFSLYWMKWVRQAPGKGLEWVSGISPSGGPTDYADSVKGRFTISRDNSKNTLYLQMNSLRAEDTATYYCATGDTLLWFGELTDYWGQGTLVTVSS

SEQ ID NO: 1965 - protein, 126 aa, Artificial Sequence
  Description of Artificial Sequence: Synthetic polypeptide
EVQLLESGGGLVQPGGSLRLSCAASGFTFSKYNMMWVRQAPGKGLEWVSYIWSSGGDTLYADSVKGRFTISRDNSKNTLYLQMNSLRAEDTAVYYCARVGYGYGGPLYYYYYMDVWGKGTTVTVSS

SEQ ID NO: 1966 - protein, 121 aa, Artificial Sequence
  Description of Artificial Sequence: Synthetic polypeptide
EVQLLESGGGLVQPGGSLRLSCAASGFTFSFYWMAWVRQAPGKGLEWVSSIGPSGGATDYADSVKGRFTISRDNSKNTLYLQMNSLRAEDTAVYYCARTNYYDRGGSFDIWGQGTMVTVSS

SEQ ID NO: 1967 - protein, 125 aa, Artificial Sequence
  Description of Artificial Sequence: Synthetic polypeptide
EVQLLESGGGLVQPGGSLRLSCAASGFTFSQYDMQWVRQAPGKGLEWVSRIGPSGGNTGYADSVKGRFTISRDNSKNTLYLQMNSLRAEDTAMYYCARINVYYDSSGYYYGMDVWGQGTTVTVSS

SEQ ID NO: 1968 - protein, 128 aa, Artificial Sequence
  Description of Artificial Sequence: Synthetic polypeptide
EVQLLESGGGLVQPGGSLRLSCAASGFTFSHYSMSWVRQAPGKGLEWVSVIYPSGGETDYADSVKGRFTISRDNSKNTLYLQMNSLRAEDTAVYYCTRDQGVDYGDYYFYYYYGMDVWGQGTTVTVSS

SEQ ID NO: 1969 - protein, 127 aa, Artificial Sequence
  Description of Artificial Sequence: Synthetic polypeptide
EVQLLESGGGLVQPGGSLRLSCAASGFTFSWYWMWVRQAPGKGLEWVSSIRPSGGFTKYADSVKGRFTISRDNSKNTLYLQMNSLRAEDTAVYYCAAVGWKGISTGLDYYYYYMDVWGKGTTVTVSS

SEQ ID NO: 1970 - protein, 127 aa, Artificial Sequence
  Description of Artificial Sequence: Synthetic polypeptide
EVQLLESGGGLVQPGGSLRLSCAASGFTFSAYEMIWVRQAPGKGLEWVSYIYSSGGWTSYADSVKGRFTISRDNSKNTLYLQMNSLRAEDTATYYCARRGLHYDSSGYYLGDYFDYWGQGTLVTVSS

SEQ ID NO: 1971 - protein, 131 aa, Artificial Sequence
  Description of Artificial Sequence: Synthetic polypeptide
EVQLLESGGGLVQPGGSLRLSCAASGFTFSSYHMDWVRQAPGKGLEWVSSISSSGGDTYYADSVKGRFTISRDNSKNTLYLQMNSLRAEDTAVYYCAKGLNYYDSNDYYEVPYYYYGMDVWGQGTTVTVSS

SEQ ID NO: 1972 - protein, 131 aa, Artificial Sequence
  Description of Artificial Sequence: Synthetic polypeptide
EVQLLESGGGLVQPGGSLRLSCAASGFTFSEYAMVWVRQAPGKGLEWVSSIVPSGGTTQYADSVKGRFTISRDNSKNTLYLQMNSLRAEDTAVYYCARVNVHYDILTGYYAYYYYYGMDVWGQGTTVTVSS

SEQ ID NO: 1973 - protein, 126 aa, Artificial Sequence
  Description of Artificial Sequence: Synthetic polypeptide
EVQLLESGGGLVQPGGSLRLSCAASGFTFSDYPMQWVRQAPGKGLEWVSSIGSSGGFTQYADYVKGRFTISRDNSKNTLYLQMNSLRAEDTAVYYCAKGSQDYDSSGYYYYYMDVWGKGTTVTVSS

SEQ ID NO: 1974 - protein, 127 aa, Artificial Sequence; identical to SEQ ID NO: 1970
  Description of Artificial Sequence: Synthetic polypeptide

SEQ ID NO: 1975 - protein, 120 aa, Artificial Sequence
  Description of Artificial Sequence: Synthetic polypeptide
EVQLLESGGGLVQPGGSLRLSCAASGFTFSHYTMDWVRQAPGKGLEWVSSIGPSGGITGYADSVKGRFTISRDNSKNTLYLQMNSLRAEDTATYYCATSSGWYWDYFDYWGQGTLVTVSS

SEQ ID NO: 1976 - protein, 118 aa, Artificial Sequence
  Description of Artificial Sequence: Synthetic polypeptide
EVQLLESGGGLVQPGGSLRLSCAASGFTFSKYMMHWVRQAPGKGLEWVSWIWPSGGVTMYADSVKGRFTISRDNSKNTLYLQMNSLRAEDTAVYYCARWGHYGGNDYWGQGTLVTVSS

SEQ ID NO: 1977 - protein, 120 aa, Artificial Sequence
  Description of Artificial Sequence: Synthetic polypeptide
EVQLLESGGGLVQPGGSLRLSCAASGFTFSFYSMGWVRQAPGKGLEWVSSISSSGGYTDYADSVKGRFTISRDNSKNTLYLQMNSLRAEDTAVYYCAREFSSWYSYMDVWGKGTTVTVSS

SEQ ID NO: 1978 - protein, 118 aa, Artificial Sequence
  Description of Artificial Sequence: Synthetic polypeptide
EVQLLESGGGLVQPGGSLRLSCAASGFTFSRYHMSWVRQAPGKGLEWVSSIRSSGGSTPYADSVKGRFTISRDNSKNTLYLQMNSLRAEDTAVYYCARGPQLSTFDIWGQGTMVTVSS

SEQ ID NO: 1979 - protein, 124 aa, Artificial Sequence
  Description of Artificial Sequence: Synthetic polypeptide
EVQLLESGGGLVQPGGSLRLSCAASGFTFSKYEMIWVRQAPGKGLEWVSSIYPSGGHTQYADSVKGRFTISRDNSNTLYLQMNSLRAEDTAVYYCARGFYGDYDYYYYYGMDVWGQGTTVTVSS

SEQ ID NO: 1980 - protein, 123 aa, Artificial Sequence
  Description of Artificial Sequence: Synthetic polypeptide
EVQLLESGGGLVQPGGSLRLSCAASGFTFSWYEMYWVRQAPGKGLEWVSWIGPSGGFTHYADSVKGRFTISRDNSKNTLYLQMNSLRAEDTALYYCATRGYSYDFEGWYFDLWGRGTLVTVSS

SEQ ID NO: 1981 - protein, 126 aa, Artificial Sequence
  Description of Artificial Sequence: Synthetic polypeptide
EVQLLESGGGLVQPGGSLRLSCAASGFTFSDYKMQWVRQAPGKGLEWVSVISSSGGHTAYADSVKGRFTISRDNSKNTLYLQMNSLRAEDTAVYYCARETYYYDSSGYYGGAFDIWGQGTMVTVSS

SEQ ID NO: 1982 - protein, 122 aa, Artificial Sequence
  Description of Artificial Sequence: Synthetic polypeptide
EVQLLESGGGLVQPGGSLRLSCAASGFTFSNYMMLWVRQAPGKGLEWVSSIWSSGGYTEYADSVKGRFTISRDNSKNTLYLQMNSLRAEDTAVYYCARGDMTTVVRNAFDIWGQGTMVTVSS

SEQ ID NO: 1983 - protein, 128 aa, Artificial Sequence
  Description of Artificial Sequence: Synthetic polypeptide
EVQLLESGGGLVQPGGSLRLSCAASGFTFSGYGMWWVRQAPGKGLEWVSSIGSSGGFTVYADSVKGRFTISRDNSKNTLYLQMNSLRAEDTAMYYCARGYHYYDSSGYYYGFEAFDIWGQGTMVTVSS

SEQ ID NO: 1984 - protein, 120 aa, Artificial Sequence
  Description of Artificial Sequence: Synthetic polypeptide
EVQLLESGGGLVQPGGSLRLSCAASGFTFSGYDMAWVRQAPGKGLEWVSSIGPSGGGTMYADSVKGRFTISRDNSKNTLYLQMNSLRAEDTAMYYCARRMESYYDSYDYWGQGTLVTVSS

SEQ ID NO: 1985 - protein, 123 aa, Artificial Sequence
  Description of Artificial Sequence: Synthetic polypeptide
EVQLLESGGGLVQPGGSLRLSCAASGFTFSWYDMRWVRQAPGKGLEWVSSISPSGGVTTYADSVKGRFTISRDNSKNTLYLQMNSLRAEDTAVYYCTTDELSWDGDPYYMDVWGKGTTVTVSS

SEQ ID NO: 1986 - protein, 120 aa, Artificial Sequence
  Description of Artificial Sequence: Synthetic polypeptide
EVQLLESGGGLVQPGGSLRLSCAASGFTFSVYDMIWVRQAPGKGLEWVSYISSSGGGTEYADSVKGRFTISRDNSKNTLYLQMNSLRAEDTAVYYCARGGSYYETAFDIWGQGTMVTVSS

SEQ ID NO: 1987 - protein, 127 aa, Artificial Sequence
  Description of Artificial Sequence: Synthetic polypeptide
EVQLLESGGGLVQPGGSLRLSCAASGFTFSNYVMSWVRQAPGKGLEWVSSIGSSGGETAYADSVKGRFTISRDNSKNTLYLQMNSLRAEDTAVYYCATVYSYDNSGRLYSFYSFYSWGQGTLVTVSS

SEQ ID NO: 1988 - protein, 122 aa, Artificial Sequence
  Description of Artificial Sequence: Synthetic polypeptide
EVQLLESGGGLVQPGGSLRLSCAASGFTFSYYNMMWVRQAPGKGLEWVSSISSSGGGTDYADSVKGRFTISRDNSKNTLYLQMNSLRAEDTAVYYCTRLGQWSSGQYYFDYWGQGTLVTVSS

SEQ ID NO: 1989 - protein, 120 aa, Artificial Sequence
  Description of Artificial Sequence: Synthetic polypeptide
EVQLLESGGGLVQPGGSLRLSCAASGFTFSYYYMVWVRQAPGKGLEWVSSIGSSGGDTLYADSVKGRFTISRDNSKNTLYLQMNSLRAEDTAVYYCARVIDSWATAFDIWGQGTMVTVSS

SEQ ID NO: 1990 - protein, 121 aa, Artificial Sequence
  Description of Artificial Sequence: Synthetic polypeptide
EVQLLESGGGLVQPGGSLRLSCAASGFTFSEYQMGWVRQAPGKGLEWVSSIVPSGGLTKYADSVKGRFTISRDNSKNTLYLQMNSLRAEDTAVYYCARGSGYYKDSHFDYWGQGTLVTVSS

SEQ ID NO: 1991 - protein, 127 aa, Artificial Sequence; identical to SEQ ID NO: 1970
  Description of Artificial Sequence: Synthetic polypeptide

SEQ ID NO: 1992 - protein, 125 aa, Artificial Sequence
  Description of Artificial Sequence: Synthetic polypeptide
EVQLLESGGGLVQPGGSLRLSCAASGFTFSIYEMEWVRQAPGKGLEWVSVISPSGGGTDYADSVKGRFTISRDNSKNTLYLQMNSLRAEDTATYYCARVRWDDFWTGYYYGMDVWGQGTTVTVSS

SEQ ID NO: 1993 - protein, 119 aa, Artificial Sequence
  Description of Artificial Sequence: Synthetic polypeptide
EVQLLESGGGLVQPGGSLRLSCAASGFTFSNYAMQWVRQAPGKGLEWVSSIWPSGGLTDYADSVKGRFTISRDNSKNTLYLQMNSLRAEDTAVYYCAREGISYDAFDIWGQGTMVTVSS

SEQ ID NO: 1994 - protein, 123 aa, Artificial Sequence
  Description of Artificial Sequence: Synthetic polypeptide
EVQLLESGGGLVQPGGSLRLSCAASGFTFSQYTMAWVRQAPGKGLEWVSGIYSSGGGTHYADSVKGRFTISRDNSKNTLYLQMNSLRAEDTAVYYCARGGGSSWYFGDAFDIWGQGTMVTVSS

SEQ ID NO: 1995 - protein, 126 aa, Artificial Sequence
  Description of Artificial Sequence: Synthetic polypeptide
EVQLLESGGGLVQPGGSLRLSCAASGFTFSAYAMYWVRQAPGKGLEWVSGISPSGGGTEYADSVKGRFTISRDNSKNTLYLQMNSLRAEDTAVYYCAREAHYYDSSGYYSGAFDIWGQGTMVTVSS

SEQ ID NO: 1996 - protein, 127 aa, Artificial Sequence
  Description of Artificial Sequence: Synthetic polypeptide
EVQLLESGGGLVQPGGSLRLSCAASGFTFSLYYMVWVRQAPGKGLEWVSGIYPSGGVTSYADSVKGRFTISRDNSKNTLYLQMNSLRAEDTAVYYCTTANGYYDSSGYYYKDAFDIWGQGTMVTVSS

SEQ ID NO: 1997 - protein, 120 aa, Artificial Sequence
  Description of Artificial Sequence: Synthetic polypeptide
EVQLLESGGGLVQPGGSLRLSCAASGFTFSAYEMRWVRQAPGKGLEWVSRIGPSGGNTQYADSVKGRFTISRDNSKNTLYLQMNSLRAEDTAVYYCTAADYGDYYGMDVWGQGTTVTVSS

SEQ ID NO: 1998 - protein, 120 aa, Artificial Sequence
  Description of Artificial Sequence: Synthetic polypeptide
EVQLLESGGGLVQPGGSLRLSCAASGFTFSMYDMGWVRQAPGKGLEWVSYIGSSGGMTTYADSVKGRFTISRDNSKNTLYLQMNSLRAEDTAVYYCARRMESYYDSYDYWGQGTLVTVSS

SEQ ID NO: 1999 - protein, 116 aa, Artificial Sequence
  Description of Artificial Sequence: Synthetic polypeptide
EVQLLESGGGLVQPGGSLRLSCAASGFTFSSYMMWVRQAPGKGLEWVSYISPSGGTTSYADSVKGRFTISRDNSKNTLYLQMNSLRAEDTAVYYCAHSWGSRFDPWGQGTLVTVSS

SEQ ID NO: 2000 - protein, 119 aa, Artificial Sequence
  Description of Artificial Sequence: Synthetic polypeptide
EVQLLESGGGLVQPGGSLRLSCAASGFTFSYYQMMWVRQAPGKGLEWVSSIGPSGLTEYADSVKGRFTISRDNSKNTLYLQMNSLRAEDTAVYYCARDGATYYDFWDYWGQGTLVTVSS

SEQ ID NO: 2001 - protein, 118 aa, Artificial Sequence
  Description of Artificial Sequence: Synthetic polypeptide
EVQLLESGGGLVQPGGSLRLSCAASGFTFSPYAMYWVRQAPGKGLEWVSSIWPSGGSTNYADSVKGRFTISRDNSKNTLYLQMNSLRAEDTAVYYCARESEIDAFDIWGQGTMVTVSS

SEQ ID NO: 2002 - protein, 127 aa, Artificial Sequence; identical to SEQ ID NO: 1970
  Description of Artificial Sequence: Synthetic polypeptide

SEQ ID NO: 2003 - protein, 133 aa, Artificial Sequence
  Description of Artificial Sequence: Synthetic polypeptide
EVQLLESGGGLVQPGGSLRLSCAASGFTFSWYYMAWVRQAPGKGLEWVSVIGPSGGDTKYADSVKGRFTISRDNSKNTLYLQMNSLRAEDTAVYYCTRVSPLDYYDSSGYYFGYYYYYGMDVWGQGTTVTVSS

SEQ ID NO: 2004 - protein, 127 aa, Artificial Sequence; identical to SEQ ID NO: 1970
  Description of Artificial Sequence: Synthetic polypeptide

SEQ ID NO: 2005 - protein, 120 aa, Artificial Sequence
  Description of Artificial Sequence: Synthetic polypeptide
EVQLLESGGGLVQPGGSLRLSCAASGFTFSFYGMGWVRQAPGKGLEWVSWISSSGGDTYYADSVKGRFTISRDNSKNTLYLQMNSLRAEDTAVYYCARDRDNWNDAADYWGQGTLVTVSS

SEQ ID NO: 2006 - protein, 118 aa, Artificial Sequence
  Description of Artificial Sequence: Synthetic polypeptide
EVQLLESGGGLVQPGGSLRLSCAASGFTFSLYPMSWVRQAPGKGLEWVSSISSSGGHTKYADSVKGRFTISRDNSKNTLYLQMNSLRAEDTAVYYCALYSYYYGMDVWGQGTTVTVSS

SEQ ID NO: 2007 - protein, 127 aa, Artificial Sequence
  Description of Artificial Sequence: Synthetic polypeptide
EVQLLESGGGLVQPGGSLRLSCAASGFTFSVYGMNWVRQAPGKGLEWVSYISPSGGTYYADSVKGRFTISRDNSKNTLYLQMNSLRAEDTAVYYCARGGYYSNSLDFYYYYYGMDVWGQGTTVTVSS

SEQ ID NO: 2008 - protein, 127 aa, Artificial Sequence
  Description of Artificial Sequence: Synthetic polypeptide
EVQLLESGGGLVQPGGSLRLSCAASGFTFSNYAMQWVRQAPGKGLEWVSYIGPSGGETGYADSVKGRFTISRDNSKNTLYLQMNSLRAEDTAVYYCARDLRGNYYDSSGYTDAFDIWGQGTMVTVSS

SEQ ID NO: 2009 - protein, 108 aa, Artificial Sequence
  Description of Artificial Sequence: Synthetic polypeptide
QDIQMTQSPSSLSASVGDRITISCQASQDIDNYLNWYQQRSGKAPKLLIYDAYNLKAGVPSRFRGSRSGTDFFLTISSLQPEDFATYYCQQSYRAPLTFGGGTKVEIK

SEQ ID NO: 2010 - protein, 108 aa, Artificial Sequence
  Description of Artificial Sequence: Synthetic polypeptide
QDIQMTQSPSSLSASVGDRVTITCQASQDTYNRLHWYQQKPGKAPKLLIYDAVNLNRGVPSRFRGSGSGTNYILIITNLQPEDTATYYCQHSDDLSLAFGGGTKVEIK

SEQ ID NO: 2011 - protein, 109 aa, Artificial Sequence
  Description of Artificial Sequence: Synthetic polypeptide
QDIQMTQSPATLSLSPGERATLSCRASHSVDNLAWYQQQPGQAPRLLIYDVSYRATGIPARFSGSGSGTDFTLTISSLEPEDFAVYYCQQRNNWPLSLTFGGGTKVEIK

SEQ ID NO: 2012 - protein, 109 aa, Artificial Sequence
  Description of Artificial Sequence: Synthetic polypeptide
QDIQMTQSPATLSLSPGERATLSCGASQNIDGYYLAWYQQKPGQAPSLLIYDASSRSTGVPDRFSGSGSGTDFTLTISRLEPEDFAVYYCQHYGNSLWTFGQGTKVEIK

SEQ ID NO: 2013 - protein, 110 aa, Artificial Sequence
  Description of Artificial Sequence: Synthetic polypeptide
QYELTQPPSASGTPGQRITISCSGSSSNLGSNPVQWYQQLPGSAPKLLIHTNTHRPSGVPDRFSGSKSVTSASLAISGLQSEDEAEYYCATWDDSLNGGVFGGGTKLTVL

SEQ ID NO: 2014 - protein, 108 aa, Artificial Sequence
  Description of Artificial Sequence: Synthetic polypeptide
QDIQMTQSPSSLSASVRDRVTITCRTSQNINTYLNWYYQAPGRAPKLLIFGVSSLHRGVSSRFSGSGDGTEFTLTISSLQPEDIGTYFCQQSYSSPWTFGQGTKVEIK

SEQ ID NO: 2015 - protein, 108 aa, Artificial Sequence; identical to SEQ ID NO: 1889
  Description of Artificial Sequence: Synthetic polypeptide

SEQ ID NO: 2016 - protein, 110 aa, Artificial Sequence
  Description of Artificial Sequence: Synthetic polypeptide
QYELTQPRSVSGSPGQSVTISCTGSSSDVAGFYYVSWYQQHPGKAPKLMIRDVNDRPSGVSNRFSGSKSGNTASLTIAGLQTEDEAVYYCSSTSRSDTRVIFGGGTKLTV

SEQ ID NO: 2017 - protein, 108 aa, Artificial Sequence
  Description of Artificial Sequence: Synthetic polypeptide
QYELTQPPSVSVAPGQTATITCEGNNIASKSVHWYQQKPGQAPVLVVYDDRDRPSGISERISGSNSGNTPTLTIFRVEAGDEADYYCQVSDSATDHRVFGGGTKLTVL

SEQ ID NO: 2018 - protein, 107 aa, Artificial Sequence
  Description of Artificial Sequence: Synthetic polypeptide
QDIQMTQSPATLSVSPGERATLSCRASQNVRNYLAWYQQKPGQAPRLLIYDASKRATGIPARFSGSGSGTDFTLTISGLEPEDFAVYYCQQRSNWPTFGPGTKVDIK

SEQ ID NO: 2019 - protein, 108 aa, Artificial Sequence
  Description of Artificial Sequence: Synthetic polypeptide
QDIQMTQSPGTLSLSPGERATLSCRASQSVSSSYLAWYQQKPGQAPRLLIYGASSRATGIPDRFSGSGSGTDFTLTISRLEPEDFAVYYCQQYGSSLTFGGGTKVEIK

SEQ ID NO: 2020 - protein, 109 aa, Artificial Sequence
  Description of Artificial Sequence: Synthetic polypeptide
QDIQMTQSPDTLSLSPGERGTLSCRASQSLSSSYLAWYQQKPGQAPRLLIYDASSRATGIPDRFSGSGSGTDFTLTIGRLEPEDSAVYYCQQYGSFPLTFGGGTKVEIK

SEQ ID NO: 2021 - protein, 124 aa, Artificial Sequence
  Description of Artificial Sequence: Synthetic polypeptide
EVQLLESGGGLVQPGGSLRLSCAASGFTFSSYPMWWVRQAPGKGLEWVSGIVPSGGVTIYADSVKGRFTISRDNSKNTLYLQMNSLRAEDTAVYYCARVGWLASSDYYYYMDVWGKGTTVTVSS

SEQ ID NO: 2022 - protein, 126 aa, Artificial Sequence
  Description of Artificial Sequence: Synthetic polypeptide
EVQLLESGGGLVQPGGSLRLSCAASGFTFSWYHMFWVRQAPGKGLEWVSGISSSGGYTHYADSVKGRFTISRDNSKNTLYLQMNSLRAEDTAVYYCATREGMLYDYVWGENYMDVWGKGTTVTVSS

SEQ ID NO: 2023 - protein, 125 aa, Artificial Sequence
  Description of Artificial Sequence: Synthetic polypeptide
EVQLLESGGGLVQPGGSLRLSCAASGFTFSAYEMDWVRQAPGKGLEWVSGISSSGGPTYYADSVKGRFTISRDNSKNTLYLQMNSLRAEDTAVYYCARVGGWELLQDYYYYMDVWGKGTTVTVSS

SEQ ID NO: 2024 - protein, 125 aa, Artificial Sequence
  Description of Artificial Sequence: Synthetic polypeptide
EVQLLESGGGLVQPGGSLRLSCAASGFTFSDYSMHWVRQAPGKGLEWVSGIGPSGGPTFYADSVKGRFTISRDNSKNTLYLQMNSLRAEDTAVYYCARGEYSSSDYYYYYGMDVWGQGTTVTVSS

SEQ ID NO: 2025 - protein, 128 aa, Artificial Sequence
  Description of Artificial Sequence: Synthetic polypeptide
EVQLLESGGGLVQPGGSLRLSCAASGFTFSWYVMVWVRQAPGKGLEWVSSIYSSGGPTKYADSVKGRFTISRDNSKNTLYLQMNSLRAEDTAVYYCAKEGGVYGGPELYYYYYGMDVWGQGTTVTVSS

SEQ ID NO: 2026 - protein, 123 aa, Artificial Sequence
  Description of Artificial Sequence: Synthetic polypeptide
EVQLLESGGGLVQPGGSLRLSCAASGFTFSEYQMAWVRQAPGKGLEWVSSIYPSGGHTHYADSVKGRFTISRDNSKNTLYLQMNSLRAEDTAVYYCAKESYYDFWSGYYFDYWGQGTLVTVSS

SEQ ID NO: 2027 - protein, 127 aa, Artificial Sequence
  Description of Artificial Sequence: Synthetic polypeptide
EVQLLESGGGLVQPGGSLRLSCAASGFTFSWYAMSWVRQAPGKGLEWVSRIVPSGGDTGYADSVKGRFTISRDNSKNTLYLQMNSLRAEDTAVYYCATFRGIMYGDYGSSYWYFDLWGRGTLVTVSS

SEQ ID NO: 2028 - protein, 129 aa, Artificial Sequence
  Description of Artificial Sequence: Synthetic polypeptide
EVQLLESGGGLVQPGGSLRLSCAASGFTFSWYAMVWVRQAPGKGLEWVSYIGSSGGVTGYADSVKGRFTISRDNSKNTLYLQMNSLRAEDTAVYYCARQKRVDYYDSSGYPTNAEFDYWGQGTLVTVSS

SEQ ID NO: 2029 - protein, 125 aa, Artificial Sequence
  Description of Artificial Sequence: Synthetic polypeptide
EVQLLESGGGLVQPGGSLRLSCAASGFTFSHYVMHWVRQAPGKGLEWVSYIGSSGGETRYADSVKGRFTISRDNSKNTLYLQMNSLRAEDTAVYYCARADYGDYDYYYYYGMDVWGQGTTVTVSS

SEQ ID NO: 2030 - protein, 119 aa, Artificial Sequence
  Description of Artificial Sequence: Synthetic polypeptide
EVQLLESGGGLVQPGGSLRLSCAASGFTFSIYQMWWVRQAPGKGLEWVSSISSSGFTWYADSVKGRFTISRDNSKNTLYLQMNSLRAEDTAVYYCTTEDIGYYYGMDVWGQGTTVTVSS

SEQ ID NO: 2031 - protein, 120 aa, Artificial Sequence
  Description of Artificial Sequence: Synthetic polypeptide
EVQLLESGGGLVQPGGSLRLSCAASGFTFSSYGMHWVRQAPGKGLEWVSGIVSSGGSTIYADSVKGRFTISRDNSKNTLYLQMNSLRAEDTAVYYCTTYDYGDHYGMDVWGQGTTVTVSS

SEQ ID NO: 2032 - protein, 125 aa, Artificial Sequence
  Description of Artificial Sequence: Synthetic polypeptide
EVQLLESGGGLVQPGGSLRLSCAASGFTFSHYEMEWVRQAPGKGLEWVSSISSSGGPTMYADSVKGRFTISRDNSKNTLYLQMNSLRAEDTAVYYCARGMYGDYDFYYYYGMDVWGQGTTVTVSS

SEQ ID NO: 2033 - protein, 22 aa, Artificial Sequence
  Description of Artificial Sequence: Synthetic peptide
QSELTQPASVSGSPGQSITISC

SEQ ID NO: 2034 - protein, 24 aa, Artificial Sequence
  Description of Artificial Sequence: Synthetic peptide
QDIQMTQSPATLSLSPGERATLSC

SEQ ID NO: 2035 - protein, 22 aa, Artificial Sequence
  Description of Artificial Sequence: Synthetic peptide
QYELTQPASVSGSPGQSITISC

SEQ ID NO: 2036 - protein, 24 aa, Artificial Sequence
  Description of Artificial Sequence: Synthetic peptide
QDIQMTQSPSSLSASVGDRVTITC

SEQ ID NO: 2037 - protein, 24 aa, Artificial Sequence
  Description of Artificial Sequence: Synthetic peptide
QDIQMTQSPSSLSASVGDRVTLTC

SEQ ID NO: 2038 - protein, 24 aa, Artificial Sequence
  Description of Artificial Sequence: Synthetic peptide
QDIQMTQSPLSLPVTPGEPASISC

SEQ ID NO: 2039 - protein, 24 aa, Artificial Sequence
  Description of Artificial Sequence: Synthetic peptide
QDIQMTQSPSSLSASVGDRVSITC

SEQ ID NO: 2040 - protein, 22 aa, Artificial Sequence
  Description of Artificial Sequence: Synthetic peptide
QSVLTQPPSASGTPGQRVTISC

SEQ ID NO: 2041 - protein, 24 aa, Artificial Sequence
  Description of Artificial Sequence: Synthetic peptide
QDIQMTQSPGTLSLSSGERATLSC

SEQ ID NO: 2042 - protein, 22 aa, Artificial Sequence
  Description of Artificial Sequence: Synthetic peptide
QSELTQPPSASGTPGQRVTISC

SEQ ID NO: 2043 - protein, 22 aa, Artificial Sequence
  Description of Artificial Sequence: Synthetic peptide
QYELTQPASVSGSPGQSITISC

SEQ ID NO: 2044 - protein, 22 aa, Artificial Sequence
  Description of Artificial Sequence: Synthetic peptide
QSALTQSSSASASLGSSVTLTC

SEQ ID NO: 2045 - protein, 24 aa, Artificial Sequence
  Description of Artificial Sequence: Synthetic peptide
QDIQMTQSPSSLSASVGDRVAITC

SEQ ID NO: 2046 - protein, 22 aa, Artificial Sequence
  Description of Artificial Sequence: Synthetic peptide
QSALTQSSSASASLGSSVTLTC

SEQ ID NO: 2047 - protein, 24 aa, Artificial Sequence
  Description of Artificial Sequence: Synthetic peptide
QDIQMTQSPDSLSASVGDRVTITC

SEQ ID NO: 2048 - protein, 22 aa, Artificial Sequence
  Description of Artificial Sequence: Synthetic peptide
QSALTQPASVSGSPGQSITISC

SEQ ID NO: 2049 - protein, 24 aa, Artificial Sequence
  Description of Artificial Sequence: Synthetic peptide
QDIQMTQSPSSLSASVGDRVTITC

SEQ ID NO: 2050 - protein, 22 aa, Artificial Sequence
  Description of Artificial Sequence: Synthetic peptide
QYELTQPPSLSVSPGQTASITC

SEQ ID NO: 2051 - protein, 24 aa, Artificial Sequence
  Description of Artificial Sequence: Synthetic peptide
QNIQMTQSPSSVSASVGDRVTITC

SEQ ID NO: 2052 - protein, 22 aa, Artificial Sequence
  Description of Artificial Sequence: Synthetic peptide
QSELTQPASVSGSPGQSITISC

SEQ ID NO: 2053 - protein, 24 aa, Artificial Sequence
  Description of Artificial Sequence: Synthetic peptide
QDIQMTQSPLSLPVTPGEPASISC

SEQ ID NO: 2054 - protein, 22 aa, Artificial Sequence
  Description of Artificial Sequence: Synthetic peptide
QYELTQPASVSGSPGQSITISC

SEQ ID NO: 2055 - protein, 22 aa, Artificial Sequence
  Description of Artificial Sequence: Synthetic peptide
QSVLTQPPSVSVAPGQTARITC

SEQ ID NO: 2056 - protein, 24 aa, Artificial Sequence
  Description of Artificial Sequence: Synthetic peptide
QDIQMTQSPSSLSASVGDRVTITC

SEQ ID NO: 2057 - protein, 22 aa, Artificial Sequence
  Description of Artificial Sequence: Synthetic peptide
QSELTQPHSVSESPGTTVTISC

SEQ ID NO: 2058 - protein, 24 aa, Artificial Sequence
  Description of Artificial Sequence: Synthetic peptide
QDIQMTQSPSTLSASVGDRVTITC

SEQ ID NO: 2059 - protein, 14 aa, Artificial Sequence
  Description of Artificial Sequence: Synthetic peptide
TGTSSDVGGYNYLS

SEQ ID NO: 2060 - protein, 12 aa, Artificial Sequence
  Description of Artificial Sequence: Synthetic peptide
RASQSVSSSYLA

SEQ ID NO: 2061 - protein, 14 aa, Artificial Sequence
  Description of Artificial Sequence: Synthetic peptide
TGTSSDVGGYNYVS

SEQ ID NO: 2062 - protein, 11 aa, Artificial Sequence
  Description of Artificial Sequence: Synthetic peptide
RASQRIASYLN

SEQ ID NO: 2063 - protein, 11 aa, Artificial Sequence
  Description of Artificial Sequence: Synthetic peptide
RTSENVERYLN

SEQ ID NO: 2064 - protein, 16 aa, Artificial Sequence
  Description of Artificial Sequence: Synthetic peptide
RSSQSLLHDNGYNYLD

SEQ ID NO: 2065 - protein, 11 aa, Artificial Sequence
  Description of Artificial Sequence: Synthetic peptide
RASQNINSYLN

SEQ ID NO: 2066 - protein, 13 aa, Artificial Sequence
  Description of Artificial Sequence: Synthetic peptide
SGTSPNIGSNTVS

SEQ ID NO: 2067 - protein, 12 aa, Artificial Sequence
  Description of Artificial Sequence: Synthetic peptide
RASQSVSSNYLA

SEQ ID NO: 2068 - protein, 13 aa, Artificial Sequence
  Description of Artificial Sequence: Synthetic peptide
SGSSSNIGSNTVN

SEQ ID NO: 2069 - protein, 14 aa, Artificial Sequence
  Description of Artificial Sequence: Synthetic peptide
TGTNSDIGDYNFVS

SEQ ID NO: 2070 - protein, 12 aa, Artificial Sequence
  Description of Artificial Sequence: Synthetic peptide
TLSSGHGDYIIA

SEQ ID NO: 2071 - protein, 11 aa, Artificial Sequence
  Description of Artificial Sequence: Synthetic peptide
RASQSIDTYLN

SEQ ID NO: 2072 - protein, 12 aa, Artificial Sequence
  Description of Artificial Sequence: Synthetic peptide
TLSSGHGDYIIA

SEQ ID NO: 2073 - protein, 11 aa, Artificial Sequence
  Description of Artificial Sequence: Synthetic peptide
RASQSISTYLN

SEQ ID NO: 2074 - protein, 14 aa, Artificial Sequence
  Description of Artificial Sequence: Synthetic peptide
TGTSSDVGGYNYVS

SEQ ID NO: 2075 - protein, 11 aa, Artificial Sequence
  Description of Artificial Sequence: Synthetic peptide
RASQRISSYLN

SEQ ID NO: 2076 - protein, 11 aa, Artificial Sequence
  Description of Artificial Sequence: Synthetic peptide
SGEKLGEKFAS

SEQ ID NO: 2077 - protein, 11 aa, Artificial Sequence
  Description of Artificial Sequence: Synthetic peptide
RASQDINYWLA

SEQ ID NO: 2078 - protein, 14 aa, Artificial Sequence
  Description of Artificial Sequence: Synthetic peptide
TGTSSDVGAYNYVS

SEQ ID NO: 2079 - protein, 16 aa, Artificial Sequence
  Description of Artificial Sequence: Synthetic peptide
RSSQSLLYSNGYNYLD

SEQ ID NO: 2080 - protein, 14 aa, Artificial Sequence
  Description of Artificial Sequence: Synthetic peptide
TGTSSDIGGYNFVS

SEQ ID NO: 2081 - protein, 11 aa, Artificial Sequence
  Description of Artificial Sequence: Synthetic peptide
GGNNIGSKTVN

SEQ ID NO: 2082 - protein, 11 aa, Artificial Sequence
  Description of Artificial Sequence: Synthetic peptide
RASQSISYFLN

SEQ ID NO: 2083 - protein, 13 aa, Artificial Sequence
  Description of Artificial Sequence: Synthetic peptide
TSSSGNIASNYVQ

SEQ ID NO: 2084 - protein, 11 aa, Artificial Sequence
  Description of Artificial Sequence: Synthetic peptide
RASQSISSWLA

SEQ ID NO: 2085 - protein, 15 aa, Artificial Sequence
  Description of Artificial Sequence: Synthetic peptide
WYQQHPGKAPKLMIY

SEQ ID NO: 2086 - protein, 15 aa, Artificial Sequence
  Description of Artificial Sequence: Synthetic peptide
WYQQKPGQAPRLLIY

SEQ ID NO: 2087 - protein, 15 aa, Artificial Sequence
  Description of Artificial Sequence: Synthetic peptide
WYQQHPGKAPKLMIY

SEQ ID NO: 2088 - protein, 15 aa, Artificial Sequence
  Description of Artificial Sequence: Synthetic peptide
WYQQKPGKAPKLLIY

SEQ ID NO: 2089 - protein, 15 aa, Artificial Sequence
  Description of Artificial Sequence: Synthetic peptide
WYQHRPGKSPRLVIY

SEQ ID NO: 2090 - protein, 15 aa, Artificial Sequence
  Description of Artificial Sequence: Synthetic peptide
WYLQKPGQSPQLLIY

SEQ ID NO: 2091 - protein, 15 aa, Artificial Sequence
  Description of Artificial Sequence: Synthetic peptide
WYQQKVGKAPKLLIF

SEQ ID NO: 2092 - protein, 15 aa, Artificial Sequence
  Description of Artificial Sequence: Synthetic peptide
WYQQLPGTAPKLLIY

SEQ ID NO: 2093 - protein, 15 aa, Artificial Sequence
  Description of Artificial Sequence: Synthetic peptide
WYQQKRGQAPRLLIY

SEQ ID NO: 2094 - protein, 15 aa, Artificial Sequence
  Description of Artificial Sequence: Synthetic peptide
WYQQLPGTAPKLLIY

SEQ ID NO: 2095 - protein, 15 aa, Artificial Sequence
  Description of Artificial Sequence: Synthetic peptide
WYQQHPGKAPKLMIS

SEQ ID NO: 2096 - protein, 14 aa, Artificial Sequence
  Description of Artificial Sequence: Synthetic peptide
WHQQQPGKAPRYLM

SEQ ID NO: 2097 - protein, 15 aa, Artificial Sequence
  Description of Artificial Sequence: Synthetic peptide
WYQQKPGKAPKLLIY

SEQ ID NO: 2098 - protein, 14 aa, Artificial Sequence
  Description of Artificial Sequence: Synthetic peptide
WHQQQPGKAPRYLM

SEQ ID NO: 2099 - protein, 15 aa, Artificial Sequence
  Description of Artificial Sequence: Synthetic peptide
WYQQKPGKAPKLLIY

SEQ ID NO: 2100 - protein, 15 aa, Artificial Sequence
  Description of Artificial Sequence: Synthetic peptide
WYQQHPGKTPKLMIY

SEQ ID NO: 2101 - protein, 15 aa, Artificial Sequence
  Description of Artificial Sequence: Synthetic peptide
WYQQKPGKAPKLLIY

SEQ ID NO: 2102 - protein, 15 aa, Artificial Sequence
  Description of Artificial Sequence: Synthetic peptide
WYQRRPGQSPLLIIY

SEQ ID NO: 2103 - protein, 15 aa, Artificial Sequence
  Description of Artificial Sequence: Synthetic peptide
WYQQKPGKAPKLLIY

SEQ ID NO: 2104 - protein, 15 aa, Artificial Sequence
  Description of Artificial Sequence: Synthetic peptide
WYQQHPGKVPKLMIY

SEQ ID NO: 2105 - protein, 15 aa, Artificial Sequence
  Description of Artificial Sequence: Synthetic peptide
WYLQKPGQSPQLLIY

SEQ ID NO: 2106 - protein, 15 aa, Artificial Sequence
  Description of Artificial Sequence: Synthetic peptide
WYQQHPGRAPKLTIY

SEQ ID NO: 2107 - protein, 15 aa, Artificial Sequence
  Description of Artificial Sequence: Synthetic peptide
WYQQKTGQAPVLVVH

SEQ ID NO: 2108 - protein, 15 aa, Artificial Sequence
  Description of Artificial Sequence: Synthetic peptide
WYQQKPGKAPKLLIY

SEQ ID NO: 2109 - protein, 15 aa, Artificial Sequence
  Description of Artificial Sequence: Synthetic peptide
WYQQRPNSAPTIVIY

SEQ ID NO: 2110 - protein, 15 aa, Artificial Sequence
  Description of Artificial Sequence: Synthetic peptide
WYQQKPGKAPKLLIY

SEQ ID NO: 2111 - protein, 7 aa, Artificial Sequence
  Description of Artificial Sequence: Synthetic peptide
EVTNRPS

SEQ ID NO: 2112 - protein, 7 aa, Artificial Sequence
  Description of Artificial Sequence: Synthetic peptide
GASSRAT

SEQ ID NO: 2113 - protein, 7 aa, Artificial Sequence
  Description of Artificial Sequence: Synthetic peptide
EVSNRPS

SEQ ID NO: 2114 - protein, 7 aa, Artificial Sequence
  Description of Artificial Sequence: Synthetic peptide
AASSLQS

SEQ ID NO: 2115 - protein, 7 aa, Artificial Sequence
  Description of Artificial Sequence: Synthetic peptide
DASKLQT

SEQ ID NO: 2116 - protein, 7 aa, Artificial Sequence
  Description of Artificial Sequence: Synthetic peptide
LGSNRAS

SEQ ID NO: 2117 - protein, 7 aa, Artificial Sequence
  Description of Artificial Sequence: Synthetic peptide
GAYTLHS

SEQ ID NO: 2118 - protein, 7 aa, Artificial Sequence
  Description of Artificial Sequence: Synthetic peptide
NNNQRPS

SEQ ID NO: 2119 - protein, 7 aa, Artificial Sequence
  Description of Artificial Sequence: Synthetic peptide
GASSRAT

SEQ ID NO: 2120 - protein, 7 aa, Artificial Sequence
  Description of Artificial Sequence: Synthetic peptide
SNNQRPS

SEQ ID NO: 2121 - protein, 7 aa, Artificial Sequence
  Description of Artificial Sequence: Synthetic peptide
EVSNRPS

SEQ ID NO: 2122 - protein, 12 aa, Artificial Sequence
  Description of Artificial Sequence: Synthetic peptide
KLENSGSFKKGS

SEQ ID NO: 2123 - protein, 7 aa, Artificial Sequence
  Description of Artificial Sequence: Synthetic peptide
AASKLED

SEQ ID NO: 2124 - protein, 12 aa, Artificial Sequence
  Description of Artificial Sequence: Synthetic peptide
KLENSGSFKKGS

SEQ ID NO: 2125 - protein, 7 aa, Artificial Sequence
  Description of Artificial Sequence: Synthetic peptide
AASSLQS

SEQ ID NO: 2126 - protein, 7 aa, Artificial Sequence
  Description of Artificial Sequence: Synthetic peptide
DVSNRPS

SEQ ID NO: 2127 - protein, 7 aa, Artificial Sequence
  Description of Artificial Sequence: Synthetic peptide
AASSLQS

SEQ ID NO: 2128 - protein, 7 aa, Artificial Sequence
  Description of Artificial Sequence: Synthetic peptide
QDNKRPS

SEQ ID NO: 2129 - protein, 7 aa, Artificial Sequence
  Description of Artificial Sequence: Synthetic peptide
AASSLQS

SEQ ID NO: 2130 - protein, 7 aa, Artificial Sequence
  Description of Artificial Sequence: Synthetic peptide
EVSNRPS

SEQ ID NO: 2131 - protein, 7 aa, Artificial Sequence
  Description of Artificial Sequence: Synthetic peptide
LGSNRAS

SEQ ID NO: 2132 - protein, 7 aa, Artificial Sequence
  Description of Artificial Sequence: Synthetic peptide
EVNNRPS

SEQ ID NO: 2133 - protein, 7 aa, Artificial Sequence
  Description of Artificial Sequence: Synthetic peptide
DDSDRPS

SEQ ID NO: 2134 - protein, 7 aa, Artificial Sequence
  Description of Artificial Sequence: Synthetic peptide
AASTLQG

SEQ ID NO: 2135 - protein, 7 aa, Artificial Sequence
  Description of Artificial Sequence: Synthetic peptide
AYNRRPS

SEQ ID NO: 2136 - protein, 7 aa, Artificial Sequence
  Description of Artificial Sequence: Synthetic peptide
DASSLES

SEQ ID NO: 2137 - protein, 32 aa, Artificial Sequence
  Description of Artificial Sequence: Synthetic polypeptide
GVSNRFSGSKSGNTASLTISGLQAEDEADYYC

SEQ ID NO: 2138 - protein, 32 aa, Artificial Sequence; identical to SEQ ID NO: 218
  Description of Artificial Sequence: Synthetic polypeptide

SEQ ID NO: 2139 - protein, 32 aa, Artificial Sequence; identical to SEQ ID NO: 2137
  Description of Artificial Sequence: Synthetic polypeptide

SEQ ID NO: 2140 - protein, 32 aa, Artificial Sequence
  Description of Artificial Sequence: Synthetic polypeptide
GVPSRFSGSGSGTDFTLTVSSLQPEDFATYYC

SEQ ID NO: 2141 - protein, 32 aa, Artificial Sequence
  Description of Artificial Sequence: Synthetic polypeptide
GVPSRFTGRGSGTDFTLTINSLQPEDFATYYC

SEQ ID NO: 2142 - protein, 32 aa, Artificial Sequence
  Description of Artificial Sequence: Synthetic polypeptide
GVPDRFSGSGSGTDFTLKISRVEAEDVGVYYC

SEQ ID NO: 2143 - protein, 32 aa, Artificial Sequence
  Description of Artificial Sequence: Synthetic polypeptide
GAPSRFSGSGSGTDFTLTISSLQPEDVATYYC

SEQ ID NO: 2144 - protein, 32 aa, Artificial Sequence
  Description of Artificial Sequence: Synthetic polypeptide
GVPDRFSGSKSGTSASLAISGLQSEDEADYYC

SEQ ID NO: 2145 - protein, 32 aa, Artificial Sequence
  Description of Artificial Sequence: Synthetic polypeptide
GVPGRFSGSGSGTDFTLTISRLEPEDFAVYYC

SEQ ID NO: 2146 - protein, 32 aa, Artificial Sequence; identical to SEQ ID NO: 2144
  Description of Artificial Sequence: Synthetic polypeptide

SEQ ID NO: 2147 - protein, 32 aa, Artificial Sequence
  Description of Artificial Sequence: Synthetic polypeptide
GVSNRFSGSKSGNTASLSISGLQAEDEAHYYC

SEQ ID NO: 2148 - protein, 32 aa, Artificial Sequence
  Description of Artificial Sequence: Synthetic polypeptide
GVPDRFSGSSSGADRYLTISDLQSDDEADYYC

SEQ ID NO: 2149 - protein, 32 aa, Artificial Sequence
  Description of Artificial Sequence: Synthetic polypeptide
GVPSRFSGSGTGTDFTLTIRSLQPEDFASYFC

SEQ ID NO: 2150 - protein, 32 aa, Artificial Sequence; identical to SEQ ID NO: 2148
  Description of Artificial Sequence: Synthetic polypeptide

SEQ ID NO: 2151 - protein, 32 aa, Artificial Sequence; identical to SEQ ID NO: 186
  Description of Artificial Sequence: Synthetic polypeptide

SEQ ID NO: 2152 - protein, 32 aa, Artificial Sequence; identical to SEQ ID NO: 2137
  Description of Artificial Sequence: Synthetic polypeptide

SEQ ID NO: 2153 - protein, 32 aa, Artificial Sequence
  Description of Artificial Sequence: Synthetic polypeptide
GVPSRFSGSGSGTDFTLTIRSLQPEDFATYYC

SEQ ID NO: 2154 - protein, 32 aa, Artificial Sequence
  Description of Artificial Sequence: Synthetic polypeptide
GIPERFSGSNSGNTAALTITGTQAMDDADYYC

SEQ ID NO: 2155 - protein, 32 aa, Artificial Sequence; identical to SEQ ID NO: 186
  Description of Artificial Sequence: Synthetic polypeptide

SEQ ID NO: 2156 - protein, 32 aa, Artificial Sequence; identical to SEQ ID NO: 2137
  Description of Artificial Sequence: Synthetic polypeptide

SEQ ID NO: 2157 - protein, 32 aa, Artificial Sequence; identical to SEQ ID NO: 2142
  Description of Artificial Sequence: Synthetic polypeptide

SEQ ID NO: 2158 - protein, 32 aa, Artificial Sequence; identical to SEQ ID NO: 2137
  Description of Artificial Sequence: Synthetic polypeptide

SEQ ID NO: 2159 - protein, 32 aa, Artificial Sequence
  Description of Artificial Sequence: Synthetic polypeptide
GIPERLSGSNSGNTATLTISRVEAGDEADYYC

SEQ ID NO: 2160 - protein, 32 aa, Artificial Sequence
  Description of Artificial Sequence: Synthetic polypeptide
GVPSRFRGSGSGTDFTLTISSLQPEDFATYYC

SEQ ID NO: 2161 - protein, 34 aa, Artificial Sequence
  Description of Artificial Sequence: Synthetic polypeptide
GVPDRFSGSIDSSSNSASLTVSGLKTEDEADYYC

SEQ ID NO: 2162 - protein, 32 aa, Artificial Sequence
  Description of Artificial Sequence: Synthetic polypeptide
GVPSRFSGSGSGTEFTLTISSLQPEDIGTYYC

SEQ ID NO: 2163 - protein, 10 aa, Artificial Sequence
  Description of Artificial Sequence: Synthetic peptide
SSYTSTTTLL

SEQ ID NO: 2164 - protein, 9 aa, Artificial Sequence
  Description of Artificial Sequence: Synthetic peptide
QQYGSSPLT

SEQ ID NO: 2165 - protein, 11 aa, Artificial Sequence
  Description of Artificial Sequence: Synthetic peptide
SSYTSSSTLFR

SEQ ID NO: 2166 - protein, 9 aa, Artificial Sequence
  Description of Artificial Sequence: Synthetic peptide
QQSYSAPLT

SEQ ID NO: 2167 - protein, 9 aa, Artificial Sequence
  Description of Artificial Sequence: Synthetic peptide
QQTSITPHT

SEQ ID NO: 2168 - protein, 9 aa, Artificial Sequence
  Description of Artificial Sequence: Synthetic peptide
MQGLQTPLT

SEQ ID NO: 2169 - protein, 8 aa, Artificial Sequence
  Description of Artificial Sequence: Synthetic peptide
QQTYTSYS

SEQ ID NO: 2170 - protein, 11 aa, Artificial Sequence
  Description of Artificial Sequence: Synthetic peptide
VAWDDSLNGFV

SEQ ID NO: 2171 - protein, 9 aa, Artificial Sequence
  Description of Artificial Sequence: Synthetic peptide
QQYGSSPRT

SEQ ID NO: 2172 - protein, 12 aa, Artificial Sequence
  Description of Artificial Sequence: Synthetic peptide
AAWDDSLNGRWV

SEQ ID NO: 2173 - protein, 11 aa, Artificial Sequence
  Description of Artificial Sequence: Synthetic peptide
SSYTSSSTPVV

SEQ ID NO: 2174 - protein, 10 aa, Artificial Sequence
  Description of Artificial Sequence: Synthetic peptide
ETWDSNIRLV

SEQ ID NO: 2175 - protein, 10 aa, Artificial Sequence
  Description of Artificial Sequence: Synthetic peptide
QQSYSSPGIT

SEQ ID NO: 2176 - protein, 10 aa, Artificial Sequence
  Description of Artificial Sequence: Synthetic peptide
ETWDSNIRLV

SEQ ID NO: 2177 - protein, 9 aa, Artificial Sequence
  Description of Artificial Sequence: Synthetic peptide
QQSYSTPLT

SEQ ID NO: 2178 - protein, 10 aa, Artificial Sequence
  Description of Artificial Sequence: Synthetic peptide
SSYTSSSTLV

SEQ ID NO: 2179 - protein, 9 aa, Artificial Sequence
  Description of Artificial Sequence: Synthetic peptide
QQSYSSRWT

SEQ ID NO: 2180 - protein, 9 aa, Artificial Sequence
  Description of Artificial Sequence: Synthetic peptide
QAWESTTAV

SEQ ID NO: 2181 - protein, 9 aa, Artificial Sequence
  Description of Artificial Sequence: Synthetic peptide
QRANSFPYT

SEQ ID NO: 2182 - protein, 10 aa, Artificial Sequence
  Description of Artificial Sequence: Synthetic peptide
NSYTTSATLV

SEQ ID NO: 2183 - protein, 9 aa, Artificial Sequence
  Description of Artificial Sequence: Synthetic peptide
MQALQTPLT

SEQ ID NO: 2184 - protein, 10 aa, Artificial Sequence
  Description of Artificial Sequence: Synthetic peptide
SSYTPSSTLV

SEQ ID NO: 2185 - protein, 11 aa, Artificial Sequence
  Description of Artificial Sequence: Synthetic peptide
QVWDSGTDHYV

SEQ ID NO: 2186 - protein, 10 aa, Artificial Sequence
  Description of Artificial Sequence: Synthetic peptide
QHSYSTPPIT

SEQ ID NO: 2187 - protein, 11 aa, Artificial Sequence
  Description of Artificial Sequence: Synthetic peptide
QSYDNINRLWV

SEQ ID NO: 2188 - protein, 8 aa, Artificial Sequence
  Description of Artificial Sequence: Synthetic peptide
QQYDHLPT

SEQ ID NO: 2189 - protein, 10 aa, Artificial Sequence
  Description of Artificial Sequence: Synthetic peptide
FGGGTKLTVL

SEQ ID NO: 2190 - protein, 10 aa, Artificial Sequence
  Description of Artificial Sequence: Synthetic peptide
FGGGTKVEIK

SEQ ID NO: 2191 - protein, 10 aa, Artificial Sequence
  Description of Artificial Sequence: Synthetic peptide
FGGGTKLTVL

SEQ ID NO: 2192 - protein, 10 aa, Artificial Sequence
  Description of Artificial Sequence: Synthetic peptide
FGGGTKVEIK

SEQ ID NO: 2193 - protein, 10 aa, Artificial Sequence
  Description of Artificial Sequence: Synthetic peptide
FGQGTKLDVK

SEQ ID NO: 2194 - protein, 10 aa, Artificial Sequence
  Description of Artificial Sequence: Synthetic peptide
FGGGTKVEIK

SEQ ID NO: 2195 - protein, 10 aa, Artificial Sequence
  Description of Artificial Sequence: Synthetic peptide
FAQGTKLEIK

SEQ ID NO: 2196 - protein, 10 aa, Artificial Sequence
  Description of Artificial Sequence: Synthetic peptide
LGTGTKVTVL

SEQ ID NO: 2197 - protein, 10 aa, Artificial Sequence
  Description of Artificial Sequence: Synthetic peptide
FGQGTKLEIK

SEQ ID NO: 2198 - protein, 10 aa, Artificial Sequence
  Description of Artificial Sequence: Synthetic peptide
FGGGTKLTVL

SEQ ID NO: 2199 - protein, 10 aa, Artificial Sequence
  Description of Artificial Sequence: Synthetic peptide
FGGGTKLTVL

SEQ ID NO: 2200 - protein, 10 aa, Artificial Sequence
  Description of Artificial Sequence: Synthetic peptide
FGGGTKLTVL

SEQ ID NO: 2201 - protein, 10 aa, Artificial Sequence
  Description of Artificial Sequence: Synthetic peptide
FGPGTKVEIK

SEQ ID NO: 2202 - protein, 10 aa, Artificial Sequence
  Description of Artificial Sequence: Synthetic peptide
FGGGTKLTVL

SEQ ID NO: 2203 - protein, 10 aa, Artificial Sequence
  Description of Artificial Sequence: Synthetic peptide
FGGGTKVEIK

SEQ ID NO: 2204 - protein, 10 aa, Artificial Sequence
  Description of Artificial Sequence: Synthetic peptide
FGGGTKLTVL

SEQ ID NO: 2205 - protein, 10 aa, Artificial Sequence
  Description of Artificial Sequence: Synthetic peptide
FGQGTKVEIQ

SEQ ID NO: 2206 - protein, 10 aa, Artificial Sequence
  Description of Artificial Sequence: Synthetic peptide
FGGGTKLTVL

SEQ ID NO: 2207 - protein, 10 aa, Artificial Sequence
  Description of Artificial Sequence: Synthetic peptide
FGQGTKLEIK

SEQ ID NO: 2208 - protein, 10 aa, Artificial Sequence
  Description of Artificial Sequence: Synthetic peptide
FGGGTKLTVL

SEQ ID NO: 2209 - protein, 10 aa, Artificial Sequence
  Description of Artificial Sequence: Synthetic peptide
FGGGTKVEIK

SEQ ID NO: 2210 - protein, 10 aa, Artificial Sequence
  Description of Artificial Sequence: Synthetic peptide
FGTGTKVTVL

SEQ ID NO: 2211 - protein, 10 aa, Artificial Sequence
  Description of Artificial Sequence: Synthetic peptide
FGTGTKVTVL

SEQ ID NO: 2212 - protein, 10 aa, Artificial Sequence
  Description of Artificial Sequence: Synthetic peptide
FGPGTKVDIK

SEQ ID NO: 2213 - protein, 10 aa, Artificial Sequence
  Description of Artificial Sequence: Synthetic peptide
FGGGTKLTVL

SEQ ID NO: 2214 - protein, 10 aa, Artificial Sequence
  Description of Artificial Sequence: Synthetic peptide
FGGGTKVQVK

SEQ ID NO: 2215 - protein, 7 aa, Artificial Sequence
  Description of Artificial Sequence: Synthetic peptide
GQPKAAP

SEQ ID NO: 2216 - protein, 7 aa, Artificial Sequence
  Description of Artificial Sequence: Synthetic peptide
RTVAAPS

SEQ ID NO: 2217 - protein, 7 aa, Artificial Sequence
  Description of Artificial Sequence: Synthetic peptide
GQPKAAP

SEQ ID NO: 2218 - protein, 7 aa, Artificial Sequence
  Description of Artificial Sequence: Synthetic peptide
RTVAAPS

SEQ ID NO: 2219 - protein, 7 aa, Artificial Sequence
  Description of Artificial Sequence: Synthetic peptide
RTVAAPS

SEQ ID NO: 2220 - protein, 7 aa, Artificial Sequence
  Description of Artificial Sequence: Synthetic peptide
RTVSAPS

SEQ ID NO: 2221 - protein, 7 aa, Artificial Sequence
  Description of Artificial Sequence: Synthetic peptide
AAPSVFI

SEQ ID NO: 2222 - protein, 7 aa, Artificial Sequence
  Description of Artificial Sequence: Synthetic peptide
GQPKANP

SEQ ID NO: 2223 - protein, 7 aa, Artificial Sequence
  Description of Artificial Sequence: Synthetic peptide
RTVAAPS

SEQ ID NO: 2224 - protein, 7 aa, Artificial Sequence
  Description of Artificial Sequence: Synthetic peptide
GQPKAAP

SEQ ID NO: 2225 - protein, 7 aa, Artificial Sequence
  Description of Artificial Sequence: Synthetic peptide
GQPKAAP

SEQ ID NO: 2226 - protein, 7 aa, Artificial Sequence
  Description of Artificial Sequence: Synthetic peptide
SQPKAAP

SEQ ID NO: 2227 - protein, 7 aa, Artificial Sequence
  Description of Artificial Sequence: Synthetic peptide
RTVAAPS

SEQ ID NO: 2228 - protein, 7 aa, Artificial Sequence
  Description of Artificial Sequence: Synthetic peptide
SQPKAAP

SEQ ID NO: 2229 - protein, 7 aa, Artificial Sequence
  Description of Artificial Sequence: Synthetic peptide
RTVAAPS

SEQ ID NO: 2230 - protein, 7 aa, Artificial Sequence
  Description of Artificial Sequence: Synthetic peptide
GQPKAAP

SEQ ID NO: 2231 - protein, 7 aa, Artificial Sequence
  Description of Artificial Sequence: Synthetic peptide
RTVAAPS

SEQ ID NO: 2232 - protein, 7 aa, Artificial Sequence
  Description of Artificial Sequence: Synthetic peptide
GQPKANP

SEQ ID NO: 2233 - protein, 7 aa, Artificial Sequence
  Description of Artificial Sequence: Synthetic peptide
RTVAAPS

SEQ ID NO: 2234 - protein, 7 aa, Artificial Sequence
  Description of Artificial Sequence: Synthetic peptide
SQPKAAP

SEQ ID NO: 2235 - protein, 7 aa, Artificial Sequence
  Description of Artificial Sequence: Synthetic peptide
RTVAAPS

SEQ ID NO: 2236 - protein, 7 aa, Artificial Sequence
  Description of Artificial Sequence: Synthetic peptide
RQPKANP

SEQ ID NO: 2237 - protein, 7 aa, Artificial Sequence
  Description of Artificial Sequence: Synthetic peptide
GQPKANP

SEQ ID NO: 2238 - protein, 7 aa, Artificial Sequence
  Description of Artificial Sequence: Synthetic peptide
RTVAAPS

SEQ ID NO: 2239 - protein, 7 aa, Artificial Sequence
  Description of Artificial Sequence: Synthetic peptide
GQPKAAP

SEQ ID NO: 2240 - protein, 7 aa, Artificial Sequence
  Description of Artificial Sequence: Synthetic peptide
RTVAAPS

SEQ ID NO: 2241 - protein, 30 aa, Artificial Sequence; identical to SEQ ID NO: 322
  Description of Artificial Sequence: Synthetic polypeptide

SEQ ID NO: 2242 - protein, 30 aa, Artificial Sequence; identical to SEQ ID NO: 322
  Description of Artificial Sequence: Synthetic polypeptide

SEQ ID NO: 2243 - protein, 30 aa, Artificial Sequence; identical to SEQ ID NO: 322
  Description of Artificial Sequence: Synthetic polypeptide

SEQ ID NO: 2244 - protein, 30 aa, Artificial Sequence; identical to SEQ ID NO: 322
  Description of Artificial Sequence: Synthetic polypeptide

SEQ ID NO: 2245 - protein, 30 aa, Artificial Sequence; identical to SEQ ID NO: 322
  Description of Artificial Sequence: Synthetic polypeptide

SEQ ID NO: 2246 - protein, 30 aa, Artificial Sequence; identical to SEQ ID NO: 322
  Description of Artificial Sequence: Synthetic polypeptide

SEQ ID NO: 2247 - protein, 30 aa, Artificial Sequence; identical to SEQ ID NO: 322
  Description of Artificial Sequence: Synthetic polypeptide

SEQ ID NO: 2248 - protein, 30 aa, Artificial Sequence; identical to SEQ ID NO: 322
  Description of Artificial Sequence: Synthetic polypeptide

SEQ ID NO: 2249 - protein, 30 aa, Artificial Sequence; identical to SEQ ID NO: 322
  Description of Artificial Sequence: Synthetic polypeptide

SEQ ID NO: 2250 - protein, 30 aa, Artificial Sequence; identical to SEQ ID NO: 322
  Description of Artificial Sequence: Synthetic polypeptide

SEQ ID NO: 2251 - protein, 30 aa, Artificial Sequence; identical to SEQ ID NO: 322
  Description of Artificial Sequence: Synthetic polypeptide

SEQ ID NO: 2252 - protein, 30 aa, Artificial Sequence; identical to SEQ ID NO: 322
  Description of Artificial Sequence: Synthetic polypeptide

SEQ ID NO: 2253 - protein, 30 aa, Artificial Sequence; identical to SEQ ID NO: 322
  Description of Artificial Sequence: Synthetic polypeptide

SEQ ID NO: 2254 - protein, 30 aa, Artificial Sequence; identical to SEQ ID NO: 322
  Description of Artificial Sequence: Synthetic polypeptide

SEQ ID NO: 2255 - protein, 30 aa, Artificial Sequence; identical to SEQ ID NO: 322
  Description of Artificial Sequence: Synthetic polypeptide

SEQ ID NO: 2256 - protein, 30 aa, Artificial Sequence; identical to SEQ ID NO: 322
  Description of Artificial Sequence: Synthetic polypeptide

SEQ ID NO: 2257 - protein, 30 aa, Artificial Sequence; identical to SEQ ID NO: 322
  Description of Artificial Sequence: Synthetic polypeptide

SEQ ID NO: 2258 - protein, 30 aa, Artificial Sequence; identical to SEQ ID NO: 322
  Description of Artificial Sequence: Synthetic polypeptide

SEQ ID NO: 2259 - protein, 30 aa, Artificial Sequence; identical to SEQ ID NO: 322
  Description of Artificial Sequence: Synthetic polypeptide

SEQ ID NO: 2260 - protein, 30 aa, Artificial Sequence; identical to SEQ ID NO: 322
  Description of Artificial Sequence: Synthetic polypeptide

SEQ ID NO: 2261 - protein, 30 aa, Artificial Sequence; identical to SEQ ID NO: 322
  Description of Artificial Sequence: Synthetic polypeptide

SEQ ID NO: 2262 - protein, 30 aa, Artificial Sequence; identical to SEQ ID NO: 322
  Description of Artificial Sequence: Synthetic polypeptide

SEQ ID NO: 2263 - protein, 30 aa, Artificial Sequence; identical to SEQ ID NO: 322
  Description of Artificial Sequence: Synthetic polypeptide

SEQ ID NO: 2264 - protein, 30 aa, Artificial Sequence; identical to SEQ ID NO: 322
  Description of Artificial Sequence: Synthetic polypeptide

SEQ ID NO: 2265 - protein, 30 aa, Artificial Sequence; identical to SEQ ID NO: 322
  Description of Artificial Sequence: Synthetic polypeptide

SEQ ID NO: 2266 - protein, 30 aa, Artificial Sequence
  Description of Artificial Sequence: Synthetic polypeptide
EVQLLESGGGLVQPGGSLRLSCAASGFTFV

SEQ ID NO: 2267 - protein, 5 aa, Artificial Sequence
  Description of Artificial Sequence: Synthetic peptide
WYPMI

SEQ ID NO: 2268 - protein, 5 aa, Artificial Sequence
  Description of Artificial Sequence: Synthetic peptide
DYGMM

SEQ ID NO: 2269 - protein, 5 aa, Artificial Sequence
  Description of Artificial Sequence: Synthetic peptide
DYPMS

SEQ ID NO: 2270 - protein, 5 aa, Artificial Sequence
  Description of Artificial Sequence: Synthetic peptide
EYAMR

SEQ ID NO: 2271 - protein, 5 aa, Artificial Sequence
  Description of Artificial Sequence: Synthetic peptide
EYNMH

SEQ ID NO: 2272 - protein, 5 aa, Artificial Sequence
  Description of Artificial Sequence: Synthetic peptide
EYNMN

SEQ ID NO: 2273 - protein, 5 aa, Artificial Sequence
  Description of Artificial Sequence: Synthetic peptide
EYPMY

SEQ ID NO: 2274 - protein, 5 aa, Artificial Sequence
  Description of Artificial Sequence: Synthetic peptide
FYAMT

SEQ ID NO: 2275 - protein, 5 aa, Artificial Sequence
  Description of Artificial Sequence: Synthetic peptide
HYWMH

SEQ ID NO: 2276 - protein, 5 aa, Artificial Sequence
  Description of Artificial Sequence: Synthetic peptide
IYMMG

SEQ ID NO: 2277 - protein, 5 aa, Artificial Sequence
  Description of Artificial Sequence: Synthetic peptide
KYPMV

SEQ ID NO: 2278 - protein, 5 aa, Artificial Sequence
  Description of Artificial Sequence: Synthetic peptide
MYAMV

SEQ ID NO: 2279 - protein, 5 aa, Artificial Sequence
  Description of Artificial Sequence: Synthetic peptide
MYPMN

SEQ ID NO: 2280 - protein, 5 aa, Artificial Sequence
  Description of Artificial Sequence: Synthetic peptide
PYDMT

SEQ ID NO: 2281 - protein, 5 aa, Artificial Sequence
  Description of Artificial Sequence: Synthetic peptide
PYIMK

SEQ ID NO: 2282 - protein, 5 aa, Artificial Sequence
  Description of Artificial Sequence: Synthetic peptide
PYSMG

SEQ ID NO: 2283 - protein, 5 aa, Artificial Sequence
  Description of Artificial Sequence: Synthetic peptide
RYGML

SEQ ID NO: 2284 - protein, 5 aa, Artificial Sequence
  Description of Artificial Sequence: Synthetic peptide
RYTMG

SEQ ID NO: 2285 - protein, 5 aa, Artificial Sequence
  Description of Artificial Sequence: Synthetic peptide
RYWMD

SEQ ID NO: 2286 - protein, 5 aa, Artificial Sequence
  Description of Artificial Sequence: Synthetic peptide
TYPMS

SEQ ID NO: 2287 - protein, 5 aa, Artificial Sequence
  Description of Artificial Sequence: Synthetic peptide
WYKMG

SEQ ID NO: 2288 - protein, 5 aa, Artificial Sequence
  Description of Artificial Sequence: Synthetic peptide
WYPMI

SEQ ID NO: 2289 - protein, 5 aa, Artificial Sequence
  Description of Artificial Sequence: Synthetic peptide
YYEME

SEQ ID NO: 2290 - protein, 5 aa, Artificial Sequence
  Description of Artificial Sequence: Synthetic peptide
YYPMA

SEQ ID NO: 2291 - protein, 5 aa, Artificial Sequence
  Description of Artificial Sequence: Synthetic peptide
YYPMV

SEQ ID NO: 2292 - protein, 4 aa, Artificial Sequence
  Description of Artificial Sequence: Synthetic peptide
YHMQ

SEQ ID NO: 2293 - protein, 14 aa, Artificial Sequence
  Description of Artificial Sequence: Synthetic peptide
WVRQAPGKGLEWVS

SEQ ID NO: 2294 - protein, 14 aa, Artificial Sequence
  Description of Artificial Sequence: Synthetic peptide
WVRQAPGKGLEWVS

SEQ ID NO: 2295 - protein, 14 aa, Artificial Sequence
  Description of Artificial Sequence: Synthetic peptide
WVRQAPGKGLEWVS

SEQ ID NO: 2296 - protein, 14 aa, Artificial Sequence
  Description of Artificial Sequence: Synthetic peptide
WVRQAPGKGLEWVS

SEQ ID NO: 2297 - protein, 14 aa, Artificial Sequence
  Description of Artificial Sequence: Synthetic peptide
WVRQAPGKGLEWVS

SEQ ID NO: 2298 - protein, 14 aa, Artificial Sequence
  Description of Artificial Sequence: Synthetic peptide
WVRQAPGKGLEWVS

SEQ ID NO: 2299 - protein, 14 aa, Artificial Sequence
  Description of Artificial Sequence: Synthetic peptide
WVRQAPGKGLEWVS

SEQ ID NO: 2300 - protein, 14 aa, Artificial Sequence
  Description of Artificial Sequence: Synthetic peptide
WVRQAPGKGLEWVS

SEQ ID NO: 2301 - protein, 14 aa, Artificial Sequence
  Description of Artificial Sequence: Synthetic peptide
WVRQAPGKGLEWVS

SEQ ID NO: 2302 - protein, 14 aa, Artificial Sequence
  Description of Artificial Sequence: Synthetic peptide
WVRQAPGKGLEWVS

SEQ ID NO: 2303 - protein, 14 aa, Artificial Sequence
  Description of Artificial Sequence: Synthetic peptide
WVRQAPGKGLEWVS

SEQ ID NO: 2304 - protein, 14 aa, Artificial Sequence
  Description of Artificial Sequence: Synthetic peptide
WVRQAPGKGLEWVS

SEQ ID NO: 2305 - protein, 14 aa, Artificial Sequence
  Description of Artificial Sequence: Synthetic peptide
WVRQAPGKGLEWVS

SEQ ID NO: 2306 - protein, 14 aa, Artificial Sequence
  Description of Artificial Sequence: Synthetic peptide
WVRQAPGKGLEWVS

SEQ ID NO: 2307 - protein, 14 aa, Artificial Sequence
  Description of Artificial Sequence: Synthetic peptide
WVRQAPGKGLEWVS

SEQ ID NO: 2308 - protein, 14 aa, Artificial Sequence
  Description of Artificial Sequence: Synthetic peptide
WVRQAPGKGLEWVS

SEQ ID NO: 2309 - protein, 14 aa, Artificial Sequence
  Description of Artificial Sequence: Synthetic peptide
WVRQAPGKGLEWVS

SEQ ID NO: 2310 - protein, 14 aa, Artificial Sequence
  Description of Artificial Sequence: Synthetic peptide
WVRQAPGKGLEWVS

SEQ ID NO: 2311 - protein, 14 aa, Artificial Sequence
  Description of Artificial Sequence: Synthetic peptide
WVRQAPGKGLEWVS

SEQ ID NO: 2312 - protein, 14 aa, Artificial Sequence
  Description of Artificial Sequence: Synthetic peptide
WVRQAPGKGLEWVS

SEQ ID NO: 2313 - protein, 14 aa, Artificial Sequence
  Description of Artificial Sequence: Synthetic peptide
WVRQAPGKGLEWVS

SEQ ID NO: 2314 - protein, 14 aa, Artificial Sequence
  Description of Artificial Sequence: Synthetic peptide
WVRQAPGKGLEWVS

SEQ ID NO: 2315 - protein, 14 aa, Artificial Sequence
  Description of Artificial Sequence: Synthetic peptide
WVRQAPGKGLEWVS

SEQ ID NO: 2316 - protein, 14 aa, Artificial Sequence
  Description of Artificial Sequence: Synthetic peptide
WVRQAPGKGLEWVS

SEQ ID NO: 2317 - protein, 14 aa, Artificial Sequence
  Description of Artificial Sequence: Synthetic peptide
WVRQAPGKGLEWVS

SEQ ID NO: 2318 - protein, 14 aa, Artificial Sequence
  Description of Artificial Sequence: Synthetic peptide
WVRQAPGKGLEWVS

SEQ ID NO: 2319 - protein, 17 aa, Artificial Sequence
  Description of Artificial Sequence: Synthetic peptide
SISSSGAYTHYADSVKG

SEQ ID NO: 2320 - protein, 17 aa, Artificial Sequence
  Description of Artificial Sequence: Synthetic peptide
SISPSGGDTHYADSVKG

SEQ ID NO: 2321 - protein, 17 aa, Artificial Sequence
  Description of Artificial Sequence: Synthetic peptide
SISSSGGSTEYADSVKG

SEQ ID NO: 2322 - protein, 17 aa, Artificial Sequence
  Description of Artificial Sequence: Synthetic peptide
SISPSGGSTWYADSVKG

SEQ ID NO: 2323 - protein, 17 aa, Artificial Sequence
  Description of Artificial Sequence: Synthetic peptide
SISPSGGNTRYADSVKG

SEQ ID NO: 2324 - protein, 17 aa, Artificial Sequence
  Description of Artificial Sequence: Synthetic peptide
GISSSGGQTMYADSVKG

SEQ ID NO: 2325 - protein, 17 aa, Artificial Sequence
  Description of Artificial Sequence: Synthetic peptide
VIYPSGGWTDYADSVKG

SEQ ID NO: 2326 - protein, 17 aa, Artificial Sequence
  Description of Artificial Sequence: Synthetic peptide
RIVPSGGDTMYADSVKG

SEQ ID NO: 2327 - protein, 17 aa, Artificial Sequence
  Description of Artificial Sequence: Synthetic peptide
SISSSGGMTYYADSVKG

SEQ ID NO: 2328 - protein, 17 aa, Artificial Sequence
  Description of Artificial Sequence: Synthetic peptide
SISPSGGWTRYADSVKG

SEQ ID NO: 2329 - protein, 17 aa, Artificial Sequence
  Description of Artificial Sequence: Synthetic peptide
SIGPSGGVTAYADSVKG

SEQ ID NO: 2330 - protein, 17 aa, Artificial Sequence
  Description of Artificial Sequence: Synthetic peptide
SISPSGGLTDYADSVKG

SEQ ID NO: 2331 - protein, 17 aa, Artificial Sequence
  Description of Artificial Sequence: Synthetic peptide
RIVSSGGTTHYADSVKG

SEQ ID NO: 2332 - protein, 17 aa, Artificial Sequence
  Description of Artificial Sequence: Synthetic peptide
GIVPSGGFTSYADSVKG

SEQ ID NO: 2333 - protein, 17 aa, Artificial Sequence
  Description of Artificial Sequence: Synthetic peptide
YISSSGGITMYADSVKG

SEQ ID NO: 2334 - protein, 17 aa, Artificial Sequence
  Description of Artificial Sequence: Synthetic peptide
GIGPSGGYTTYADSVKG

SEQ ID NO: 2335 - protein, 17 aa, Artificial Sequence
  Description of Artificial Sequence: Synthetic peptide
VIYPSGGPTLYADSVKG

SEQ ID NO: 2336 - protein, 17 aa, Artificial Sequence
  Description of Artificial Sequence: Synthetic peptide
RIYSSGGNTVYADSVKG

SEQ ID NO: 2337 - protein, 17 aa, Artificial Sequence
  Description of Artificial Sequence: Synthetic peptide
GIYPSGGYTLYADSVKG

SEQ ID NO: 2338 - protein, 17 aa, Artificial Sequence
  Description of Artificial Sequence: Synthetic peptide
SISPSGGWTRYADSVKG

SEQ ID NO: 2339 - protein, 17 aa, Artificial Sequence
  Description of Artificial Sequence: Synthetic peptide
GISSSGGLTFYADSVKG

SEQ ID NO: 2340 - protein, 17 aa, Artificial Sequence
  Description of Artificial Sequence: Synthetic peptide
SISSSGGYTHYADSVKG

SEQ ID NO: 2341 - protein, 17 aa, Artificial Sequence
  Description of Artificial Sequence: Synthetic peptide
GIYPSGGITTYADSVKG

SEQ ID NO: 2342 - protein, 17 aa, Artificial Sequence
  Description of Artificial Sequence: Synthetic peptide
YISSSGGLTTYADSVKG

SEQ ID NO: 2343 - protein, 17 aa, Artificial Sequence
  Description of Artificial Sequence: Synthetic peptide
VIYPSGGYTHYADSVKG

SEQ ID NO: 2344 - protein, 17 aa, Artificial Sequence
  Description of Artificial Sequence: Synthetic peptide
GISPSGGLTDYADSVKG

SEQ ID NO: 2345 - protein, 32 aa, Artificial Sequence; identical to SEQ ID NO: 952
  Description of Artificial Sequence: Synthetic polypeptide

SEQ ID NO: 2346 - protein, 32 aa, Artificial Sequence; identical to SEQ ID NO: 952
  Description of Artificial Sequence: Synthetic polypeptide

SEQ ID NO: 2347 - protein, 32 aa, Artificial Sequence
  Description of Artificial Sequence: Synthetic polypeptide
RFNISRDNSKNTLYLQMNSLRAEDTAMYYCAR

SEQ ID NO: 2348 - protein, 32 aa, Artificial Sequence; identical to SEQ ID NO: 952
  Description of Artificial Sequence: Synthetic polypeptide

SEQ ID NO: 2349 - protein, 32 aa, Artificial Sequence; identical to SEQ ID NO: 952
  Description of Artificial Sequence: Synthetic polypeptide

SEQ ID NO: 2350 - protein, 32 aa, Artificial Sequence; identical to SEQ ID NO: 952
  Description of Artificial Sequence: Synthetic polypeptide

SEQ ID NO: 2351 - protein, 32 aa, Artificial Sequence; identical to SEQ ID NO: 952
  Description of Artificial Sequence: Synthetic polypeptide

SEQ ID NO: 2352 - protein, 32 aa, Artificial Sequence; identical to SEQ ID NO: 952
  Description of Artificial Sequence: Synthetic polypeptide

SEQ ID NO: 2353 - protein, 32 aa, Artificial Sequence
  Description of Artificial Sequence: Synthetic polypeptide
RFTISRDNSKNTLYLQMNSLRAEDTAVYYCTT

SEQ ID NO: 2354 - protein, 32 aa, Artificial Sequence; identical to SEQ ID NO: 2353
  Description of Artificial Sequence: Synthetic polypeptide

SEQ ID NO: 2355 - protein, 32 aa, Artificial Sequence
  Description of Artificial Sequence: Synthetic polypeptide
RFTISRDNSKNTLYLQMNSLRAEDTAMYYCAR

SEQ ID NO: 2356 - protein, 32 aa, Artificial Sequence
  Description of Artificial Sequence: Synthetic polypeptide
RFTISRDNSKNTLYLQMNSLRAEDTATYYCAN

SEQ ID NO: 2357 - protein, 32 aa, Artificial Sequence; identical to SEQ ID NO: 2353
  Description of Artificial Sequence: Synthetic polypeptide

SEQ ID NO: 2358 - protein, 32 aa, Artificial Sequence
  Description of Artificial Sequence: Synthetic polypeptide
RFTISRDNSKNTLYLQMNSLRVEDTAVYYCAR

SEQ ID NO: 2359 - protein, 32 aa, Artificial Sequence
  Description of Artificial Sequence: Synthetic polypeptide
RFTISRDNSKNTLYLQMNSLRAEDTAVYYCAA

SEQ ID NO: 2360 - protein, 32 aa, Artificial Sequence
  Description of Artificial Sequence: Synthetic polypeptide
RFTISRDNFKNTLYLQMNSLRAEDTAVYYCAR

SEQ ID NO: 2361 - protein, 32 aa, Artificial Sequence; identical to SEQ ID NO: 952
  Description of Artificial Sequence: Synthetic polypeptide

SEQ ID NO: 2362 - protein, 32 aa, Artificial Sequence
  Description of Artificial Sequence: Synthetic polypeptide
RFTISRDNSKNTLYLQMNSLRAEDTATYYCAR

SEQ ID NO: 2363 - protein, 32 aa, Artificial Sequence; identical to SEQ ID NO: 952
  Description of Artificial Sequence: Synthetic polypeptide

SEQ ID NO: 2364 - protein, 32 aa, Artificial Sequence
  Description of Artificial Sequence: Synthetic polypeptide
RFTISRDNSKNTLYLQMNSLRAEDTAVYYCAS

SEQ ID NO: 2365 - protein, 32 aa, Artificial Sequence
  Description of Artificial Sequence: Synthetic polypeptide
RFTISRDNSNNTLYLQMNSLRAEDTAVYYCAR

SEQ ID NO: 2366 - protein, 32 aa, Artificial Sequence; identical to SEQ ID NO: 952
  Description of Artificial Sequence: Synthetic polypeptide

SEQ ID NO: 2367 - protein, 32 aa, Artificial Sequence; identical to SEQ ID NO: 952
  Description of Artificial Sequence: Synthetic polypeptide

SEQ ID NO: 2368 - protein, 32 aa, Artificial Sequence; identical to SEQ ID NO: 952
  Description of Artificial Sequence: Synthetic polypeptide

SEQ ID NO: 2369 - protein, 32 aa, Artificial Sequence; identical to SEQ ID NO: 2355
  Description of Artificial Sequence: Synthetic polypeptide

SEQ ID NO: 2370 - protein, 32 aa, Artificial Sequence
  Description of Artificial Sequence: Synthetic polypeptide
RFTISRDNSKNTLYLQMNSLRAEDTAVYYCAH

SEQ ID NO: 2371 - protein, 11 aa, Artificial Sequence
  Description of Artificial Sequence: Synthetic peptide
EGVDTAMAFGY

SEQ ID NO: 2372 - protein, 10 aa, Artificial Sequence
  Description of Artificial Sequence: Synthetic peptide
WEAKVDAFDI

SEQ ID NO: 2373 - protein, 10 aa, Artificial Sequence
  Description of Artificial Sequence: Synthetic peptide
HPDGVARFDP

SEQ ID NO: 2374 - protein, 14 aa, Artificial Sequence
  Description of Artificial Sequence: Synthetic peptide
RGWAAAGYYYGMDV

SEQ ID NO: 2375 - protein, 13 aa, Artificial Sequence
  Description of Artificial Sequence: Synthetic peptide
DGVSKWYYHGIDV

SEQ ID NO: 2376 - protein, 11 aa, Artificial Sequence
  Description of Artificial Sequence: Synthetic peptide
GVAYDSKTPDI

SEQ ID NO: 2377 - protein, 11 aa, Artificial Sequence
  Description of Artificial Sequence: Synthetic peptide
MAVTGGSRFDY

SEQ ID NO: 2378 - protein, 18 aa, Artificial Sequence
  Description of Artificial Sequence: Synthetic peptide
DLGDYDFWSGTLYYGMDV

SEQ ID NO: 2379 - protein, 11 aa, Artificial Sequence
  Description of Artificial Sequence: Synthetic peptide
ADYGYYYGMDV

SEQ ID NO: 2380 - protein, 13 aa, Artificial Sequence
  Description of Artificial Sequence: Synthetic peptide
APYPNWNYHYFDY

SEQ ID NO: 2381 - protein, 9 aa, Artificial Sequence
  Description of Artificial Sequence: Synthetic peptide
HSRDIAVDY

SEQ ID NO: 2382 - protein, 11 aa, Artificial Sequence
  Description of Artificial Sequence: Synthetic peptide
PWPLTAELADI

SEQ ID NO: 2383 - protein, 7 aa, Artificial Sequence
  Description of Artificial Sequence: Synthetic peptide
GDYSWDY

SEQ ID NO: 2384 - protein, 9 aa, Artificial Sequence
  Description of Artificial Sequence: Synthetic peptide
RGVVGGLDY

SEQ ID NO: 2385 - protein, 8 aa, Artificial Sequence
  Description of Artificial Sequence: Synthetic peptide
ENRVPFDY

SEQ ID NO: 2386 - protein, 10 aa, Artificial Sequence
  Description of Artificial Sequence: Synthetic peptide
HPVGYDAFDI

SEQ ID NO: 2387 - protein, 13 aa, Artificial Sequence
  Description of Artificial Sequence: Synthetic peptide
DGVLRGSHIYFDY

SEQ ID NO: 2388 - protein, 11 aa, Artificial Sequence
  Description of Artificial Sequence: Synthetic peptide
TRRDGYNPFDY

SEQ ID NO: 2389 - protein, 7 aa, Artificial Sequence
  Description of Artificial Sequence: Synthetic peptide
HGDYMDV

SEQ ID NO: 2390 - protein, 10 aa, Artificial Sequence
  Description of Artificial Sequence: Synthetic peptide
SPYGPDAFDI

SEQ ID NO: 2391 - protein, 13 aa, Artificial Sequence
  Description of Artificial Sequence: Synthetic peptide
VPAYSSGYGGFDY

SEQ ID NO: 2392 - protein, 11 aa, Artificial Sequence
  Description of Artificial Sequence: Synthetic peptide
EGVDTAMAFGY

SEQ ID NO: 2393 - protein, 17 aa, Artificial Sequence
  Description of Artificial Sequence: Synthetic peptide
VFFYYDSSGYYAPYFDY

SEQ ID NO: 2394 - protein, 18 aa, Artificial Sequence
  Description of Artificial Sequence: Synthetic peptide
SPTYYDFWSGYWAGIFDY

SEQ ID NO: 2395 - protein, 15 aa, Artificial Sequence
  Description of Artificial Sequence: Synthetic peptide
VGYDSSGYYWGYFDY

SEQ ID NO: 2396 - protein, 7 aa, Artificial Sequence
  Description of Artificial Sequence: Synthetic peptide
GTDPLTY

SEQ ID NO: 2397 - protein, 11 aa, Artificial Sequence
  Description of Artificial Sequence: Synthetic peptide
WGQGTLVTVSS

SEQ ID NO: 2398 - protein, 11 aa, Artificial Sequence
  Description of Artificial Sequence: Synthetic peptide
WGQGTTVTVSS

SEQ ID NO: 2399 - protein, 11 aa, Artificial Sequence
  Description of Artificial Sequence: Synthetic peptide
WGQGTLVTVSS

SEQ ID NO: 2400 - protein, 11 aa, Artificial Sequence
  Description of Artificial Sequence: Synthetic peptide
WGQGTTVTVSS

SEQ ID NO: 2401 - protein, 11 aa, Artificial Sequence
  Description of Artificial Sequence: Synthetic peptide
WGQGTTVTVSS

SEQ ID NO: 2402 - protein, 11 aa, Artificial Sequence
  Description of Artificial Sequence: Synthetic peptide
WGRGTMVTVSS

SEQ ID NO: 2403 - protein, 11 aa, Artificial Sequence
  Description of Artificial Sequence: Synthetic peptide
WGQGTLVTVSS

SEQ ID NO: 2404 - protein, 11 aa, Artificial Sequence
  Description of Artificial Sequence: Synthetic peptide
WGQGTTVTVSS

SEQ ID NO: 2405 - protein, 11 aa, Artificial Sequence
  Description of Artificial Sequence: Synthetic peptide
WGQGTTVTVSS

SEQ ID NO: 2406 - protein, 11 aa, Artificial Sequence
  Description of Artificial Sequence: Synthetic peptide
WGQGTLVTVSS

SEQ ID NO: 2407 - protein, 11 aa, Artificial Sequence
  Description of Artificial Sequence: Synthetic peptide
WGQGTLVTVSS

SEQ ID NO: 2408 - protein, 11 aa, Artificial Sequence
  Description of Artificial Sequence: Synthetic peptide
WGQGTMVTVSS

SEQ ID NO: 2409 - protein, 11 aa, Artificial Sequence
  Description of Artificial Sequence: Synthetic peptide
WGQGTLVTVSS

SEQ ID NO: 2410 - protein, 11 aa, Artificial Sequence
  Description of Artificial Sequence: Synthetic peptide
WGQGTLVTVSS

SEQ ID NO: 2411 - protein, 11 aa, Artificial Sequence
  Description of Artificial Sequence: Synthetic peptide
WGQGTLVTVSS

SEQ ID NO: 2412 - protein, 11 aa, Artificial Sequence
  Description of Artificial Sequence: Synthetic peptide
WGQGTMVTVSS

SEQ ID NO: 2413 - protein, 11 aa, Artificial Sequence
  Description of Artificial Sequence: Synthetic peptide
WGQGTLVTVSS

SEQ ID NO: 2414 - protein, 11 aa, Artificial Sequence
  Description of Artificial Sequence: Synthetic peptide
WGQGTLVTVSS

SEQ ID NO: 2415 - protein, 11 aa, Artificial Sequence
  Description of Artificial Sequence: Synthetic peptide
WGKGTTVTVSS

SEQ ID NO: 2416 - protein, 11 aa, Artificial Sequence
  Description of Artificial Sequence: Synthetic peptide
WGQGTMVTVSS

SEQ ID NO: 2417 - protein, 11 aa, Artificial Sequence
  Description of Artificial Sequence: Synthetic peptide
WGQGTLVTVSS

SEQ ID NO: 2418 - protein, 11 aa, Artificial Sequence
  Description of Artificial Sequence: Synthetic peptide
WGQGTLVTVSS

SEQ ID NO: 2419 - protein, 11 aa, Artificial Sequence
  Description of Artificial Sequence: Synthetic peptide
WGQGTLVTVSS

SEQ ID NO: 2420 - protein, 11 aa, Artificial Sequence
  Description of Artificial Sequence: Synthetic peptide
WGQGTLVTVSS

SEQ ID NO: 2421 - protein, 11 aa, Artificial Sequence
  Description of Artificial Sequence: Synthetic peptide
WGQGTLVTVSS

SEQ ID NO: 2422 - protein, 11 aa, Artificial Sequence
  Description of Artificial Sequence: Synthetic peptide
WGQGTLVTVSS

SEQ ID NO: 2423 - protein, 24 aa, Artificial Sequence
  Description of Artificial Sequence: Synthetic peptide
QDIQMTQSPSSLSASVGDRVSITC

SEQ ID NO: 2424 - protein, 24 aa, Artificial Sequence
  Description of Artificial Sequence: Synthetic peptide
QNIQMTQSPSSVSASVGDRVTITC

SEQ ID NO: 2425 - protein, 24 aa, Artificial Sequence
  Description of Artificial Sequence: Synthetic peptide
QDIQMTQSPSSLSASVGDRVSITC

SEQ ID NO: 2426 - protein, 24 aa, Artificial Sequence
  Description of Artificial Sequence: Synthetic peptide
QDIQMTQSPSSLSASVGDRVTITC

SEQ ID NO: 2427 - protein, 24 aa, Artificial Sequence
  Description of Artificial Sequence: Synthetic peptide
QDIQMTQSPDTLSLSPGERATLSC

SEQ ID NO: 2428 - protein, 24 aa, Artificial Sequence
  Description of Artificial Sequence: Synthetic peptide
QDIQMTQSPGTLSLSPGERATLSC

SEQ ID NO: 2429 - protein, 24 aa, Artificial Sequence
  Description of Artificial Sequence: Synthetic peptide
QDIQMTQSPGTLSLSSGERATLSC

SEQ ID NO: 2430 - protein, 24 aa, Artificial Sequence
  Description of Artificial Sequence: Synthetic peptide
QDIQMTQSPSSLSASVGDRVTITC

SEQ ID NO: 2431 - protein, 22 aa, Artificial Sequence
  Description of Artificial Sequence: Synthetic peptide
QYELTQPPALSVAPGETATITC

SEQ ID NO: 2432 - protein, 22 aa, Artificial Sequence
  Description of Artificial Sequence: Synthetic peptide
QSALTQPPSVSVAPGQTARITC

SEQ ID NO: 2433 - protein, 24 aa, Artificial Sequence
  Description of Artificial Sequence: Synthetic peptide
QDIQMTQSPGTLSLSPGERATLSC

SEQ ID NO: 2434 - protein, 22 aa, Artificial Sequence
  Description of Artificial Sequence: Synthetic peptide
QSELTQPPSVSVSPGQTATITC

SEQ ID NO: 2435 - protein, 11 aa, Artificial Sequence
  Description of Artificial Sequence: Synthetic peptide
RASQNINSYLN

SEQ ID NO: 2436 - protein, 11 aa, Artificial Sequence
  Description of Artificial Sequence: Synthetic peptide
RASQDINYWLA

SEQ ID NO: 2437 - protein, 11 aa, Artificial Sequence
  Description of Artificial Sequence: Synthetic peptide
RASQNINSYLN

SEQ ID NO: 2438 - protein, 11 aa, Artificial Sequence
  Description of Artificial Sequence: Synthetic peptide
RASQSISYFLN

SEQ ID NO: 2439 - protein, 12 aa, Artificial Sequence
  Description of Artificial Sequence: Synthetic peptide
RASQTISSTFLA

SEQ ID NO: 2440 - protein, 12 aa, Artificial Sequence
  Description of Artificial Sequence: Synthetic peptide
RASQSVSSSYLA

SEQ ID NO: 2441 - protein, 12 aa, Artificial Sequence
  Description of Artificial Sequence: Synthetic peptide
RASQSVSSNYLA

SEQ ID NO: 2442 - protein, 11 aa, Artificial Sequence
  Description of Artificial Sequence: Synthetic peptide
RANQSIYTYLN

SEQ ID NO: 2443 - protein, 11 aa, Artificial Sequence
  Description of Artificial Sequence: Synthetic peptide
GGDKIGRKSVN

SEQ ID NO: 2444 - protein, 11 aa, Artificial Sequence
  Description of Artificial Sequence: Synthetic peptide
GGNNIGTKSVH

SEQ ID NO: 2445 - protein, 12 aa, Artificial Sequence
  Description of Artificial Sequence: Synthetic peptide
RASQSVSSSYLA

SEQ ID NO: 2446 - protein, 11 aa, Artificial Sequence
  Description of Artificial Sequence: Synthetic peptide
SGDVSVHKSFC

SEQ ID NO: 2447 - protein, 15 aa, Artificial Sequence
  Description of Artificial Sequence: Synthetic peptide
WYQQKVGKAPKLLIF

SEQ ID NO: 2448 - protein, 15 aa, Artificial Sequence
  Description of Artificial Sequence: Synthetic peptide
WYQQKPGKAPKLLIY

SEQ ID NO: 2449 - protein, 15 aa, Artificial Sequence
  Description of Artificial Sequence: Synthetic peptide
WYQQKVGKAPKLLIF

SEQ ID NO: 2450 - protein, 15 aa, Artificial Sequence
  Description of Artificial Sequence: Synthetic peptide
WYQQKPGKAPKLLIY

SEQ ID NO: 2451 - protein, 15 aa, Artificial Sequence
  Description of Artificial Sequence: Synthetic peptide
WYQQKPGQAPRLLIY

SEQ ID NO: 2452 - protein, 15 aa, Artificial Sequence
  Description of Artificial Sequence: Synthetic peptide
WYQQKPGQAPRLLIY

SEQ ID NO: 2453 - protein, 15 aa, Artificial Sequence
  Description of Artificial Sequence: Synthetic peptide
WYQQKRGQAPRLLIY

SEQ ID NO: 2454 - protein, 15 aa, Artificial Sequence
  Description of Artificial Sequence: Synthetic peptide
WYQQKPGKAPELLIY

SEQ ID NO: 2455 - protein, 15 aa, Artificial Sequence
  Description of Artificial Sequence: Synthetic peptide
WYQQKAGQAPVLVIF

SEQ ID NO: 2456 - protein, 15 aa, Artificial Sequence
  Description of Artificial Sequence: Synthetic peptide
WYQQKSGQAPVLVVY

SEQ ID NO: 2457 - protein, 15 aa, Artificial Sequence
  Description of Artificial Sequence: Synthetic peptide
WYQQKPGQAPRLLIY

SEQ ID NO: 2458 - protein, 15 aa, Artificial Sequence
  Description of Artificial Sequence: Synthetic peptide
WYQQRPGQSPVLVIY

SEQ ID NO: 2459 - protein, 7 aa, Artificial Sequence
  Description of Artificial Sequence: Synthetic peptide
GAYTLHS

SEQ ID NO: 2460 - protein, 7 aa, Artificial Sequence
  Description of Artificial Sequence: Synthetic peptide
AASSLQS

SEQ ID NO: 2461 - protein, 7 aa, Artificial Sequence
  Description of Artificial Sequence: Synthetic peptide
GAYTLHS

SEQ ID NO: 2462 - protein, 7 aa, Artificial Sequence
  Description of Artificial Sequence: Synthetic peptide
AASTLQG

SEQ ID NO: 2463 - protein, 7 aa, Artificial Sequence
  Description of Artificial Sequence: Synthetic peptide
GASTRAA

SEQ ID NO: 2464 - protein, 7 aa, Artificial Sequence
  Description of Artificial Sequence: Synthetic peptide
GASSRAT

SEQ ID NO: 2465 - protein, 7 aa, Artificial Sequence
  Description of Artificial Sequence: Synthetic peptide
GASSRAT

SEQ ID NO: 2466 - protein, 7 aa, Artificial Sequence
  Description of Artificial Sequence: Synthetic peptide
AASSLQS

SEQ ID NO: 2467 - protein, 7 aa, Artificial Sequence
  Description of Artificial Sequence: Synthetic peptide
YDNDRPS

SEQ ID NO: 2468 - protein, 7 aa, Artificial Sequence
  Description of Artificial Sequence: Synthetic peptide
DNSDRPS

SEQ ID NO: 2469 - protein, 7 aa, Artificial Sequence
  Description of Artificial Sequence: Synthetic peptide
GASSRAT

SEQ ID NO: 2470 - protein, 7 aa, Artificial Sequence
  Description of Artificial Sequence: Synthetic peptide
QIDKRPS

SEQ ID NO: 2471 - protein, 32 aa, Artificial Sequence; identical to SEQ ID NO: 2143
  Description of Artificial Sequence: Synthetic polypeptide

SEQ ID NO: 2472 - protein, 32 aa, Artificial Sequence; identical to SEQ ID NO: 186
  Description of Artificial Sequence: Synthetic polypeptide

SEQ ID NO: 2473 - protein, 32 aa, Artificial Sequence; identical to SEQ ID NO: 2143
  Description of Artificial Sequence: Synthetic polypeptide

SEQ ID NO: 2474 - protein, 32 aa, Artificial Sequence; identical to SEQ ID NO: 2160
  Description of Artificial Sequence: Synthetic polypeptide

SEQ ID NO: 2475 - protein, 32 aa, Artificial Sequence
  Description of Artificial Sequence: Synthetic polypeptide
GIPDRFIGSGSGTDFTLTISSLEPEDSAVYYC

SEQ ID NO: 2476 - protein, 32 aa, Artificial Sequence; identical to SEQ ID NO: 218
  Description of Artificial Sequence: Synthetic polypeptide

SEQ ID NO: 2477 - protein, 32 aa, Artificial Sequence; identical to SEQ ID NO: 2145
  Description of Artificial Sequence: Synthetic polypeptide

SEQ ID NO: 2478 - protein, 32 aa, Artificial Sequence; identical to SEQ ID NO: 186
  Description of Artificial Sequence: Synthetic polypeptide

SEQ ID NO: 2479 - protein, 32 aa, Artificial Sequence
  Description of Artificial Sequence: Synthetic polypeptide
GITGRFSGSNSGNSATLTISRVEAGDEADFYC

SEQ ID NO: 2480 - protein, 32 aa, Artificial Sequence
  Description of Artificial Sequence: Synthetic polypeptide
GIPERFSGSNSGNTATLTISRVEAGDEADYYC

SEQ ID NO: 2481 - protein, 32 aa, Artificial Sequence; identical to SEQ ID NO: 218
  Description of Artificial Sequence: Synthetic polypeptide

SEQ ID NO: 2482 - protein, 32 aa, Artificial Sequence
  Description of Artificial Sequence: Synthetic polypeptide
GVPERFSGSISGTTATLTISGTQATDEADYYC

SEQ ID NO: 2483 - protein, 8 aa, Artificial Sequence
  Description of Artificial Sequence: Synthetic peptide
QQTYTSYS

SEQ ID NO: 2484 - protein, 9 aa, Artificial Sequence
  Description of Artificial Sequence: Synthetic peptide
QRANSFPYT

SEQ ID NO: 2485 - protein, 8 aa, Artificial Sequence
  Description of Artificial Sequence: Synthetic peptide
QQTYTSYS

SEQ ID NO: 2486 - protein, 10 aa, Artificial Sequence
  Description of Artificial Sequence: Synthetic peptide
QHSYSTPPIT

SEQ ID NO: 2487 - protein, 8 aa, Artificial Sequence
  Description of Artificial Sequence: Synthetic peptide
QQYDRSPT

SEQ ID NO: 2488 - protein, 9 aa, Artificial Sequence
  Description of Artificial Sequence: Synthetic peptide
QQYGSSPRT

SEQ ID NO: 2489 - protein, 9 aa, Artificial Sequence
  Description of Artificial Sequence: Synthetic peptide
QQYGSSPRT

SEQ ID NO: 2490 - protein, 5 aa, Artificial Sequence
  Description of Artificial Sequence: Synthetic peptide
QQAGI

SEQ ID NO: 2491 - protein, 10 aa, Artificial Sequence
  Description of Artificial Sequence: Synthetic peptide
QVWGPNDFPL

SEQ ID NO: 2492 - protein, 11 aa, Artificial Sequence
  Description of Artificial Sequence: Synthetic peptide
QVWDNSIDHVV

SEQ ID NO: 2493 - protein, 10 aa, Artificial Sequence
  Description of Artificial Sequence: Synthetic peptide
QQYGSSPPIT

SEQ ID NO: 2494 - protein, 10 aa, Artificial Sequence
  Description of Artificial Sequence: Synthetic peptide
QGWDSTTYYV

SEQ ID NO: 2495 - protein, 10 aa, Artificial Sequence
  Description of Artificial Sequence: Synthetic peptide
FAQGTKLEIK

SEQ ID NO: 2496 - protein, 10 aa, Artificial Sequence
  Description of Artificial Sequence: Synthetic peptide
FGQGTKLEIK

SEQ ID NO: 2497 - protein, 10 aa, Artificial Sequence
  Description of Artificial Sequence: Synthetic peptide
FAQGTKLEIK

SEQ ID NO: 2498 - protein, 10 aa, Artificial Sequence
  Description of Artificial Sequence: Synthetic peptide
FGPGTKVDIK

SEQ ID NO: 2499 - protein, 10 aa, Artificial Sequence
  Description of Artificial Sequence: Synthetic peptide
FGGGTKVEIK

SEQ ID NO: 2500 - protein, 10 aa, Artificial Sequence
  Description of Artificial Sequence: Synthetic peptide
FGQGTKLEIK

SEQ ID NO: 2501 - protein, 10 aa, Artificial Sequence
  Description of Artificial Sequence: Synthetic peptide
FGQGTKLEIK

SEQ ID NO: 2502 - protein, 10 aa, Artificial Sequence
  Description of Artificial Sequence: Synthetic peptide
FGQGTKLEIK

SEQ ID NO: 2503 - protein, 10 aa, Artificial Sequence
  Description of Artificial Sequence: Synthetic peptide
FGGGTKLTVL

SEQ ID NO: 2504 - protein, 10 aa, Artificial Sequence
  Description of Artificial Sequence: Synthetic peptide
FGGGTKLTVL

SEQ ID NO: 2505 - protein, 10 aa, Artificial Sequence
  Description of Artificial Sequence: Synthetic peptide
FGQGTRLEIK

SEQ ID NO: 2506 - protein, 10 aa, Artificial Sequence
  Description of Artificial Sequence: Synthetic peptide
FGTGTKVTVL

SEQ ID NO: 2507 - protein, 7 aa, Artificial Sequence
  Description of Artificial Sequence: Synthetic peptide
AAPSVFI

SEQ ID NO: 2508 - protein, 7 aa, Artificial Sequence
  Description of Artificial Sequence: Synthetic peptide
RTVAAPS

SEQ ID NO: 2509 - protein, 7 aa, Artificial Sequence
  Description of Artificial Sequence: Synthetic peptide
AAPSVFI

SEQ ID NO: 2510 - protein, 7 aa, Artificial Sequence
  Description of Artificial Sequence: Synthetic peptide
RTVAAPS

SEQ ID NO: 2511 - protein, 7 aa, Artificial Sequence
  Description of Artificial Sequence: Synthetic peptide
RTVAAPS

SEQ ID NO: 2512 - protein, 7 aa, Artificial Sequence
  Description of Artificial Sequence: Synthetic peptide
RTVAAPS

SEQ ID NO: 2513 - protein, 7 aa, Artificial Sequence
  Description of Artificial Sequence: Synthetic peptide
RTVAAPS

SEQ ID NO: 2514 - protein, 7 aa, Artificial Sequence
  Description of Artificial Sequence: Synthetic peptide
RTVAAPS

SEQ ID NO: 2515 - protein, 7 aa, Artificial Sequence
  Description of Artificial Sequence: Synthetic peptide
GQPKAAP

SEQ ID NO: 2516 - protein, 7 aa, Artificial Sequence
  Description of Artificial Sequence: Synthetic peptide
GQPKAAP

SEQ ID NO: 2517 - protein, 7 aa, Artificial Sequence
  Description of Artificial Sequence: Synthetic peptide
RTVAAPS

SEQ ID NO: 2518 - protein, 7 aa, Artificial Sequence
  Description of Artificial Sequence: Synthetic peptide
SQPKANP

SEQ ID NO: 2519 - protein, 30 aa, Artificial Sequence; identical to SEQ ID NO: 322
  Description of Artificial Sequence: Synthetic polypeptide

SEQ ID NO: 2520 - protein, 30 aa, Artificial Sequence; identical to SEQ ID NO: 322
  Description of Artificial Sequence: Synthetic polypeptide

SEQ ID NO: 2521 - protein, 30 aa, Artificial Sequence; identical to SEQ ID NO: 322
  Description of Artificial Sequence: Synthetic polypeptide

SEQ ID NO: 2522 - protein, 30 aa, Artificial Sequence; identical to SEQ ID NO: 322
  Description of Artificial Sequence: Synthetic polypeptide

SEQ ID NO: 2523 - protein, 30 aa, Artificial Sequence; identical to SEQ ID NO: 322
  Description of Artificial Sequence: Synthetic polypeptide

SEQ ID NO: 2524 - protein, 30 aa, Artificial Sequence; identical to SEQ ID NO: 322
  Description of Artificial Sequence: Synthetic polypeptide

SEQ ID NO: 2525 - protein, 30 aa, Artificial Sequence; identical to SEQ ID NO: 322
  Description of Artificial Sequence: Synthetic polypeptide

SEQ ID NO: 2526 - protein, 30 aa, Artificial Sequence; identical to SEQ ID NO: 322
  Description of Artificial Sequence: Synthetic polypeptide

SEQ ID NO: 2527 - protein, 30 aa, Artificial Sequence; identical to SEQ ID NO: 322
  Description of Artificial Sequence: Synthetic polypeptide

SEQ ID NO: 2528 - protein, 30 aa, Artificial Sequence; identical to SEQ ID NO: 322
  Description of Artificial Sequence: Synthetic polypeptide

SEQ ID NO: 2529 - protein, 30 aa, Artificial Sequence; identical to SEQ ID NO: 322
  Description of Artificial Sequence: Synthetic polypeptide

SEQ ID NO: 2530 - protein, 30 aa, Artificial Sequence; identical to SEQ ID NO: 322
  Description of Artificial Sequence: Synthetic polypeptide

SEQ ID NO: 2531 - protein, 30 aa, Artificial Sequence; identical to SEQ ID NO: 322
  Description of Artificial Sequence: Synthetic polypeptide

SEQ ID NO: 2532 - protein, 5 aa, Artificial Sequence
  Description of Artificial Sequence: Synthetic peptide
DYNMH

SEQ ID NO: 2533 - protein, 5 aa, Artificial Sequence
  Description of Artificial Sequence: Synthetic peptide
EYPMY

SEQ ID NO: 2534 - protein, 5 aa, Artificial Sequence
  Description of Artificial Sequence: Synthetic peptide
RYWMD

SEQ ID NO: 2535 - protein, 5 aa, Artificial Sequence
  Description of Artificial Sequence: Synthetic peptide
EYPMY

SEQ ID NO: 2536 - protein, 5 aa, Artificial Sequence
  Description of Artificial Sequence: Synthetic peptide
YYPMA

SEQ ID NO: 2537 - protein, 5 aa, Artificial Sequence
  Description of Artificial Sequence: Synthetic peptide
FYHME

SEQ ID NO: 2538 - protein, 5 aa, Artificial Sequence
  Description of Artificial Sequence: Synthetic peptide
SYGMH

SEQ ID NO: 2539 - protein, 5 aa, Artificial Sequence
  Description of Artificial Sequence: Synthetic peptide
HYWMH

SEQ ID NO: 2540 - protein, 5 aa, Artificial Sequence
  Description of Artificial Sequence: Synthetic peptide
DYNMH

SEQ ID NO: 2541 - protein, 5 aa, Artificial Sequence
  Description of Artificial Sequence: Synthetic peptide
MYWMF

SEQ ID NO: 2542 - protein, 5 aa, Artificial Sequence
  Description of Artificial Sequence: Synthetic peptide
WYNMW

SEQ ID NO: 2543 - protein, 5 aa, Artificial Sequence
  Description of Artificial Sequence: Synthetic peptide
RYGMT

SEQ ID NO: 2544 - protein, 5 aa, Artificial Sequence
  Description of Artificial Sequence: Synthetic peptide
EYNMP

SEQ ID NO: 2545 - protein, 14 aa, Artificial Sequence
  Description of Artificial Sequence: Synthetic peptide
WVRQAPGKGLEWVS

SEQ ID NO: 2546 - protein, 14 aa, Artificial Sequence
  Description of Artificial Sequence: Synthetic peptide
WVRQAPGKGLEWVS

SEQ ID NO: 2547 - protein, 14 aa, Artificial Sequence
  Description of Artificial Sequence: Synthetic peptide
WVRQAPGKGLEWVS

SEQ ID NO: 2548 - protein, 14 aa, Artificial Sequence
  Description of Artificial Sequence: Synthetic peptide
WVRQAPGKGLEWVS

SEQ ID NO: 2549 - protein, 14 aa, Artificial Sequence
  Description of Artificial Sequence: Synthetic peptide
WVRQAPGKGLEWVS

SEQ ID NO: 2550 - protein, 14 aa, Artificial Sequence
  Description of Artificial Sequence: Synthetic peptide
WVRQAPGKGLEWVS

SEQ ID NO: 2551 - protein, 14 aa, Artificial Sequence
  Description of Artificial Sequence: Synthetic peptide
WVRQAPGKGLEWVS

SEQ ID NO: 2552 - protein, 14 aa, Artificial Sequence
  Description of Artificial Sequence: Synthetic peptide
WVRQAPGKGLEWVS

SEQ ID NO: 2553 - protein, 14 aa, Artificial Sequence
  Description of Artificial Sequence: Synthetic peptide
WVRQAPGKGLEWVS

SEQ ID NO: 2554 - protein, 14 aa, Artificial Sequence
  Description of Artificial Sequence: Synthetic peptide
WVRQAPGKGLEWVS

SEQ ID NO: 2555 - protein, 14 aa, Artificial Sequence
  Description of Artificial Sequence: Synthetic peptide
WVRQAPGKGLEWVS

SEQ ID NO: 2556 - protein, 14 aa, Artificial Sequence
  Description of Artificial Sequence: Synthetic peptide
WVRQAPGKGLEWVS

SEQ ID NO: 2557 - protein, 14 aa, Artificial Sequence
  Description of Artificial Sequence: Synthetic peptide
WVRQAPGKGLEWVS

SEQ ID NO: 2558 - protein, 17 aa, Artificial Sequence
  Description of Artificial Sequence: Synthetic peptide
YIGPSGGYTHYADSVKG

SEQ ID NO: 2559 - protein, 17 aa, Artificial Sequence
  Description of Artificial Sequence: Synthetic peptide
VIYPSGGWTDYADSVKG

SEQ ID NO: 2560 - protein, 17 aa, Artificial Sequence
  Description of Artificial Sequence: Synthetic peptide
GIYPSGGYTLYADSVKG

SEQ ID NO: 2561 - protein, 17 aa, Artificial Sequence
  Description of Artificial Sequence: Synthetic peptide
VIYPSGGWTDYADSVKG

SEQ ID NO: 2562 - protein, 17 aa, Artificial Sequence
  Description of Artificial Sequence: Synthetic peptide
YISSSGGLTTYADSVKG

SEQ ID NO: 2563 - protein, 17 aa, Artificial Sequence
  Description of Artificial Sequence: Synthetic peptide
SISPSGGHTDYADSVKG

SEQ ID NO: 2564 - protein, 17 aa, Artificial Sequence
  Description of Artificial Sequence: Synthetic peptide
GIVSSGGSTIYADSVKG

SEQ ID NO: 2565 - protein, 17 aa, Artificial Sequence
  Description of Artificial Sequence: Synthetic peptide
SISSSGGMTYYADSVKG

SEQ ID NO: 2566 - protein, 17 aa, Artificial Sequence
  Description of Artificial Sequence: Synthetic peptide
YIGPSGGYTHYADSVKG

SEQ ID NO: 2567 - protein, 17 aa, Artificial Sequence
  Description of Artificial Sequence: Synthetic peptide
SISSSGGHTFYADSVKG

SEQ ID NO: 2568 - protein, 17 aa, Artificial Sequence
  Description of Artificial Sequence: Synthetic peptide
YIYPSGGNTGYADSVKG

SEQ ID NO: 2569 - protein, 17 aa, Artificial Sequence
  Description of Artificial Sequence: Synthetic peptide
GISPSGGNTWYADSVKG

SEQ ID NO: 2570 - protein, 17 aa, Artificial Sequence
  Description of Artificial Sequence: Synthetic peptide
YIYSSGGSTEYADSVKG

SEQ ID NO: 2571 - protein, 32 aa, Artificial Sequence; identical to SEQ ID NO: 458
  Description of Artificial Sequence: Synthetic polypeptide

SEQ ID NO: 2572 - protein, 32 aa, Artificial Sequence; identical to SEQ ID NO: 952
  Description of Artificial Sequence: Synthetic polypeptide

SEQ ID NO: 2573 - protein, 32 aa, Artificial Sequence; identical to SEQ ID NO: 952
  Description of Artificial Sequence: Synthetic polypeptide

SEQ ID NO: 2574 - protein, 32 aa, Artificial Sequence; identical to SEQ ID NO: 952
  Description of Artificial Sequence: Synthetic polypeptide

SEQ ID NO: 2575 - protein, 32 aa, Artificial Sequence; identical to SEQ ID NO: 952
  Description of Artificial Sequence: Synthetic polypeptide

SEQ ID NO: 2576 - protein, 32 aa, Artificial Sequence; identical to SEQ ID NO: 2364
  Description of Artificial Sequence: Synthetic polypeptide

SEQ ID NO: 2577 - protein, 32 aa, Artificial Sequence; identical to SEQ ID NO: 2353
  Description of Artificial Sequence: Synthetic polypeptide

SEQ ID NO: 2578 - protein, 32 aa, Artificial Sequence; identical to SEQ ID NO: 2353
  Description of Artificial Sequence: Synthetic polypeptide

SEQ ID NO: 2579 - protein, 32 aa, Artificial Sequence; identical to SEQ ID NO: 458
  Description of Artificial Sequence: Synthetic polypeptide

SEQ ID NO: 2580 - protein, 32 aa, Artificial Sequence; identical to SEQ ID NO: 952
  Description of Artificial Sequence: Synthetic polypeptide

SEQ ID NO: 2581 - protein, 32 aa, Artificial Sequence
  Description of Artificial Sequence: Synthetic polypeptide
RFTISRDNSKNTLYLQMNSLRAEDTAVYYCAV

SEQ ID NO: 2582 - protein, 32 aa, Artificial Sequence
  Description of Artificial Sequence: Synthetic polypeptide
RFTISRDNSKNTLYLQMNSLRAEDTAVYYCTS

SEQ ID NO: 2583 - protein, 32 aa, Artificial Sequence
  Description of Artificial Sequence: Synthetic polypeptide
RFTISRDNSKNTLYLQMNSLRAEDMAVYYCAK

SEQ ID NO: 2584 - protein, 13 aa, Artificial Sequence
  Description of Artificial Sequence: Synthetic peptide
DIRGAYSSGLFDY

SEQ ID NO: 2585 - protein, 11 aa, Artificial Sequence
  Description of Artificial Sequence: Synthetic peptide
MAVTGGSRFDY

SEQ ID NO: 2586 - protein, 7 aa, Artificial Sequence
  Description of Artificial Sequence: Synthetic peptide
HGDYMDV

SEQ ID NO: 2587 - protein, 11 aa, Artificial Sequence
  Description of Artificial Sequence: Synthetic peptide
MAVTGGSRFDY

SEQ ID NO: 2588 - protein, 18 aa, Artificial Sequence
  Description of Artificial Sequence: Synthetic peptide
SPTYYDFWSGYWAGIFDY

SEQ ID NO: 2589 - protein, 5 aa, Artificial Sequence
  Description of Artificial Sequence: Synthetic peptide
LLSGT

SEQ ID NO: 2590 - protein, 11 aa, Artificial Sequence
  Description of Artificial Sequence: Synthetic peptide
YDYGDHYGMDV

SEQ ID NO: 2591 - protein, 11 aa, Artificial Sequence
  Description of Artificial Sequence: Synthetic peptide
ADYGYYYGMDV

SEQ ID NO: 2592 - protein, 13 aa, Artificial Sequence
  Description of Artificial Sequence: Synthetic peptide
DIRGAYSSGLFDY

SEQ ID NO: 2593 - protein, 11 aa, Artificial Sequence
  Description of Artificial Sequence: Synthetic peptide
GSYSGYDPFDY

SEQ ID NO: 2594 - protein, 11 aa, Artificial Sequence
  Description of Artificial Sequence: Synthetic peptide
FEYSSSGPQGY

SEQ ID NO: 2595 - protein, 11 aa, Artificial Sequence
  Description of Artificial Sequence: Synthetic peptide
HDYGDHYGMDV

SEQ ID NO: 2596 - protein, 15 aa, Artificial Sequence
  Description of Artificial Sequence: Synthetic peptide
DLWEDSSTWGYGMDV

SEQ ID NO: 2597 - protein, 11 aa, Artificial Sequence
  Description of Artificial Sequence: Synthetic peptide
WGRGTLVTVSS

SEQ ID NO: 2598 - protein, 11 aa, Artificial Sequence
  Description of Artificial Sequence: Synthetic peptide
WGQGTLVTVSS

SEQ ID NO: 2599 - protein, 11 aa, Artificial Sequence
  Description of Artificial Sequence: Synthetic peptide
WGKGTTVTVSS

SEQ ID NO: 2600 - protein, 11 aa, Artificial Sequence
  Description of Artificial Sequence: Synthetic peptide
WGQGTLVTVSS

SEQ ID NO: 2601 - protein, 11 aa, Artificial Sequence
  Description of Artificial Sequence: Synthetic peptide
WGQGTLVTVSS

SEQ ID NO: 2602 - protein, 11 aa, Artificial Sequence
  Description of Artificial Sequence: Synthetic peptide
WGQGTLVTVSS

SEQ ID NO: 2603 - protein, 11 aa, Artificial Sequence
  Description of Artificial Sequence: Synthetic peptide
WGQGTTVTVSS

SEQ ID NO: 2604 - protein, 11 aa, Artificial Sequence
  Description of Artificial Sequence: Synthetic peptide
WGQGTTVTVSS

SEQ ID NO: 2605 - protein, 11 aa, Artificial Sequence
  Description of Artificial Sequence: Synthetic peptide
WGRGTLVTVSS

SEQ ID NO: 2606 - protein, 11 aa, Artificial Sequence
  Description of Artificial Sequence: Synthetic peptide
WGRGTLVTVSS

SEQ ID NO: 2607 - protein, 11 aa, Artificial Sequence
  Description of Artificial Sequence: Synthetic peptide
WGQGTLVTVSS

SEQ ID NO: 2608 - protein, 11 aa, Artificial Sequence
  Description of Artificial Sequence: Synthetic peptide
WGQGTLVTVSS

SEQ ID NO: 2609 - protein, 11 aa, Artificial Sequence
  Description of Artificial Sequence: Synthetic peptide
WGQGTTVTVSS

SEQ ID NO: 2610 - protein, 11 aa, Artificial Sequence
  Description of Artificial Sequence: Synthetic peptide
WGRGTLVTVSS

SEQ ID NO: 2611 - protein, 11 aa, Artificial Sequence
  Description of Artificial Sequence: Synthetic peptide
WGQGTLVTVSS

SEQ ID NO: 2612 - protein, 11 aa, Artificial Sequence
  Description of Artificial Sequence: Synthetic peptide
WGKGTTVTVSS

SEQ ID NO: 2613 - protein, 11 aa, Artificial Sequence
  Description of Artificial Sequence: Synthetic peptide
WGQGTLVTVSS

SEQ ID NO: 2614 - protein, 11 aa, Artificial Sequence
  Description of Artificial Sequence: Synthetic peptide
WGQGTLVTVSS

SEQ ID NO: 2615 - protein, 11 aa, Artificial Sequence
  Description of Artificial Sequence: Synthetic peptide
WGQGTLVTVSS

SEQ ID NO: 2616 - protein, 11 aa, Artificial Sequence
  Description of Artificial Sequence: Synthetic peptide
WGQGTTVTVSS

SEQ ID NO: 2617 - protein, 11 aa, Artificial Sequence
  Description of Artificial Sequence: Synthetic peptide
WGQGTTVTVSS

SEQ ID NO: 2618 - protein, 11 aa, Artificial Sequence
  Description of Artificial Sequence: Synthetic peptide
WGRGTLVTVSS

SEQ ID NO: 2619 - protein, 11 aa, Artificial Sequence
  Description of Artificial Sequence: Synthetic peptide
WGRGTLVTVSS

SEQ ID NO: 2620 - protein, 11 aa, Artificial Sequence
  Description of Artificial Sequence: Synthetic peptide
WGQGTLVTVSS

SEQ ID NO: 2621 - protein, 11 aa, Artificial Sequence
  Description of Artificial Sequence: Synthetic peptide
WGQGTLVTVSS

SEQ ID NO: 2622 - protein, 11 aa, Artificial Sequence
  Description of Artificial Sequence: Synthetic peptide
WGQGTTVTVSS

SEQ ID NO: 2623 - protein, 4 aa, Artificial Sequence
  Description of Artificial Sequence: Synthetic peptide
GVHS

SEQ ID NO: 2624 - protein, 4 aa, Artificial Sequence
  Description of Artificial Sequence: Synthetic peptide
GVHS

SEQ ID NO: 2625 - protein, 4 aa, Artificial Sequence
  Description of Artificial Sequence: Synthetic peptide
GVHS

SEQ ID NO: 2626 - protein, 4 aa, Artificial Sequence
  Description of Artificial Sequence: Synthetic peptide
GVHS

SEQ ID NO: 2627 - protein, 4 aa, Artificial Sequence
  Description of Artificial Sequence: Synthetic peptide
GVHS

SEQ ID NO: 2628 - protein, 4 aa, Artificial Sequence
  Description of Artificial Sequence: Synthetic peptide
GVHS

SEQ ID NO: 2629 - protein, 4 aa, Artificial Sequence
  Description of Artificial Sequence: Synthetic peptide
GVHS

SEQ ID NO: 2630 - protein, 4 aa, Artificial Sequence
  Description of Artificial Sequence: Synthetic peptide
GVHS

SEQ ID NO: 2631 - protein, 4 aa, Artificial Sequence
  Description of Artificial Sequence: Synthetic peptide
GVHS

SEQ ID NO: 2632 - protein, 4 aa, Artificial Sequence
  Description of Artificial Sequence: Synthetic peptide
GVHS

SEQ ID NO: 2633 - protein, 4 aa, Artificial Sequence
  Description of Artificial Sequence: Synthetic peptide
GVHS

SEQ ID NO: 2634 - protein, 4 aa, Artificial Sequence
  Description of Artificial Sequence: Synthetic peptide
GVHS

SEQ ID NO: 2635 - protein, 4 aa, Artificial Sequence
  Description of Artificial Sequence: Synthetic peptide
GVHS

SEQ ID NO: 2636 - protein, 4 aa, Artificial Sequence
  Description of Artificial Sequence: Synthetic peptide
GVHS

SEQ ID NO: 2637 - protein, 4 aa, Artificial Sequence
  Description of Artificial Sequence: Synthetic peptide
GVHS

SEQ ID NO: 2638 - protein, 4 aa, Artificial Sequence
  Description of Artificial Sequence: Synthetic peptide
GVHS

SEQ ID NO: 2639 - protein, 4 aa, Artificial Sequence
  Description of Artificial Sequence: Synthetic peptide
GVHS

SEQ ID NO: 2640 - protein, 4 aa, Artificial Sequence
  Description of Artificial Sequence: Synthetic peptide
GVHS

SEQ ID NO: 2641 - protein, 4 aa, Artificial Sequence
  Description of Artificial Sequence: Synthetic peptide
GVHS

SEQ ID NO: 2642 - protein, 4 aa, Artificial Sequence
  Description of Artificial Sequence: Synthetic peptide
GVHS

SEQ ID NO: 2643 - protein, 4 aa, Artificial Sequence
  Description of Artificial Sequence: Synthetic peptide
GVHS

SEQ ID NO: 2644 - protein, 4 aa, Artificial Sequence
  Description of Artificial Sequence: Synthetic peptide
GVHS

SEQ ID NO: 2645 - protein, 23 aa, Artificial Sequence
  Description of Artificial Sequence: Synthetic peptide
DIQMTQSPSSLSASVGDRVTITC

SEQ ID NO: 2646 - protein, 23 aa, Artificial Sequence
  Description of Artificial Sequence: Synthetic peptide
DIQMTQSPSSLSASVGDRVTITC

SEQ ID NO: 2647 - protein, 23 aa, Artificial Sequence
  Description of Artificial Sequence: Synthetic peptide
DIQMTQSPSSLSASVGDRVTITC

SEQ ID NO: 2648 - protein, 23 aa, Artificial Sequence
  Description of Artificial Sequence: Synthetic peptide
DIQMTQSPSSLSASVGDRVTITC

SEQ ID NO: 2649 - protein, 23 aa, Artificial Sequence
  Description of Artificial Sequence: Synthetic peptide
DIQMTQSPSSLSASVGDRVTITC

SEQ ID NO: 2650 - protein, 23 aa, Artificial Sequence
  Description of Artificial Sequence: Synthetic peptide
DIQMTQSPSSLSASVGDRVTITC

SEQ ID NO: 2651 - protein, 23 aa, Artificial Sequence
  Description of Artificial Sequence: Synthetic peptide
DIQMTQSPSSLSASVGDRVTITC

SEQ ID NO: 2652 - protein, 23 aa, Artificial Sequence
  Description of Artificial Sequence: Synthetic peptide
DIQMTQSPSSLSASVGDRVTITC

SEQ ID NO: 2653 - protein, 23 aa, Artificial Sequence
  Description of Artificial Sequence: Synthetic peptide
DIQMTQSPSSLSASVGDRVTITC

SEQ ID NO: 2654 - protein, 23 aa, Artificial Sequence
  Description of Artificial Sequence: Synthetic peptide
DIQMTQSPSSLSASVGDRVTITC

SEQ ID NO: 2655 - protein, 23 aa, Artificial Sequence
  Description of Artificial Sequence: Synthetic peptide
DIQMTQSPSSLSASVGDRVTITC

SEQ ID NO: 2656 - protein, 23 aa, Artificial Sequence
  Description of Artificial Sequence: Synthetic peptide
DIQMTQSPSSLSASVGDRVTITC

SEQ ID NO: 2657 - protein, 23 aa, Artificial Sequence
  Description of Artificial Sequence: Synthetic peptide
DIQMTQSPSSLSASVGDRVTITC

SEQ ID NO: 2658 - protein, 23 aa, Artificial Sequence
  Description of Artificial Sequence: Synthetic peptide
DIQMTQSPSSLSASVGDRVTITC

SEQ ID NO: 2659 - protein, 23 aa, Artificial Sequence
  Description of Artificial Sequence: Synthetic peptide
DIQMTQSPSSLSASVGDRVTITC

SEQ ID NO: 2660 - protein, 23 aa, Artificial Sequence
  Description of Artificial Sequence: Synthetic peptide
DIQMTQSPSSLSASVGDRVTITC

SEQ ID NO: 2661 - protein, 23 aa, Artificial Sequence
  Description of Artificial Sequence: Synthetic peptide
DIQMTQSPSSLSASVGDRVTITC

SEQ ID NO: 2662 - protein, 23 aa, Artificial Sequence
  Description of Artificial Sequence: Synthetic peptide
DIQMTQSPSSLSASVGDRVTITC

SEQ ID NO: 2663 - protein, 23 aa, Artificial Sequence
  Description of Artificial Sequence: Synthetic peptide
DIQMTQSPSSLSASVGDRVTITC

SEQ ID NO: 2664 - protein, 23 aa, Artificial Sequence
  Description of Artificial Sequence: Synthetic peptide
DIQMTQSPSSLSASVGDRVTITC

SEQ ID NO: 2665 - protein, 23 aa, Artificial Sequence
  Description of Artificial Sequence: Synthetic peptide
DIQMTQSPSSLSASVGDRVTITC

SEQ ID NO: 2666 - protein, 23 aa, Artificial Sequence
  Description of Artificial Sequence: Synthetic peptide
DIQMTQSPSSLSASVGDRVTITC

SEQ ID NO: 2667 - protein, 11 aa, Artificial Sequence
  Description of Artificial Sequence: Synthetic peptide
RASQSIYTYLN

SEQ ID NO: 2668 - protein, 11 aa, Artificial Sequence
  Description of Artificial Sequence: Synthetic peptide
RASQSIYTYLN

SEQ ID NO: 2669 - protein, 11 aa, Artificial Sequence
  Description of Artificial Sequence: Synthetic peptide
RASQSIYTYLN

SEQ ID NO: 2670 - protein, 11 aa, Artificial Sequence
  Description of Artificial Sequence: Synthetic peptide
RASQSIYTYLN

SEQ ID NO: 2671 - protein, 11 aa, Artificial Sequence
  Description of Artificial Sequence: Synthetic peptide
RASQSIYTYLN

SEQ ID NO: 2672 - protein, 11 aa, Artificial Sequence
  Description of Artificial Sequence: Synthetic peptide
RASQSIYTYLN

SEQ ID NO: 2673 - protein, 11 aa, Artificial Sequence
  Description of Artificial Sequence: Synthetic peptide
RANQSIYTYLN

SEQ ID NO: 2674 - protein, 11 aa, Artificial Sequence
  Description of Artificial Sequence: Synthetic peptide
RASQSIYTYLN

SEQ ID NO: 2675 - protein, 11 aa, Artificial Sequence
  Description of Artificial Sequence: Synthetic peptide
RASQSIYTYLN

SEQ ID NO: 2676 - protein, 11 aa, Artificial Sequence
  Description of Artificial Sequence: Synthetic peptide
RASQSIYTYLN

SEQ ID NO: 2677 - protein, 11 aa, Artificial Sequence
  Description of Artificial Sequence: Synthetic peptide
RANQSIYTYLN

SEQ ID NO: 2678 - protein, 11 aa, Artificial Sequence
  Description of Artificial Sequence: Synthetic peptide
RANQSIYTYLN

SEQ ID NO: 2679 - protein, 11 aa, Artificial Sequence
  Description of Artificial Sequence: Synthetic peptide
RANQSIYTYLN

SEQ ID NO: 2680 - protein, 11 aa, Artificial Sequence
  Description of Artificial Sequence: Synthetic peptide
RANQSIYTYLN

SEQ ID NO: 2681 - protein, 11 aa, Artificial Sequence
  Description of Artificial Sequence: Synthetic peptide
RANQSIYTYLN

SEQ ID NO: 2682 - protein, 11 aa, Artificial Sequence
  Description of Artificial Sequence: Synthetic peptide
RANQSIYTYLN

SEQ ID NO: 2683 - protein, 11 aa, Artificial Sequence
  Description of Artificial Sequence: Synthetic peptide
RANQSIYTYLN

SEQ ID NO: 2684 - protein, 11 aa, Artificial Sequence
  Description of Artificial Sequence: Synthetic peptide
RANQSIYTYLN

SEQ ID NO: 2685 - protein, 11 aa, Artificial Sequence
  Description of Artificial Sequence: Synthetic peptide
RANQSIYTYLN

SEQ ID NO: 2686 - protein, 11 aa, Artificial Sequence
  Description of Artificial Sequence: Synthetic peptide
RANQSIYTYLN

SEQ ID NO: 2687 - protein, 11 aa, Artificial Sequence
  Description of Artificial Sequence: Synthetic peptide
RANQSIYTYLN

SEQ ID NO: 2688 - protein, 11 aa, Artificial Sequence
  Description of Artificial Sequence: Synthetic peptide
RANQSIYTYLN

SEQ ID NO: 2689 - protein, 15 aa, Artificial Sequence
  Description of Artificial Sequence: Synthetic peptide
WYQQKPGKAPKLLIY

SEQ ID NO: 2690 - protein, 15 aa, Artificial Sequence
  Description of Artificial Sequence: Synthetic peptide
WYQQKPGKAPKLLIY

SEQ ID NO: 2691 - protein, 15 aa, Artificial Sequence
  Description of Artificial Sequence: Synthetic peptide
WYQQKPGKAPKLLIY

SEQ ID NO: 2692 - protein, 15 aa, Artificial Sequence
  Description of Artificial Sequence: Synthetic peptide
WYQQKPGKAPKLLIY

SEQ ID NO: 2693 - protein, 15 aa, Artificial Sequence
  Description of Artificial Sequence: Synthetic peptide
WYQQKPGKAPKLLIY

SEQ ID NO: 2694 - protein, 15 aa, Artificial Sequence
  Description of Artificial Sequence: Synthetic peptide
WYQQKPGKAPKLLIY

SEQ ID NO: 2695 - protein, 15 aa, Artificial Sequence
  Description of Artificial Sequence: Synthetic peptide
WYQQKPGKAPKLLIY

SEQ ID NO: 2696 - protein, 15 aa, Artificial Sequence
  Description of Artificial Sequence: Synthetic peptide
WYQQKPGKAPKLLIY

SEQ ID NO: 2697 - protein, 15 aa, Artificial Sequence
  Description of Artificial Sequence: Synthetic peptide
WYQQKPGKAPKLLIY

SEQ ID NO: 2698 - protein, 15 aa, Artificial Sequence
  Description of Artificial Sequence: Synthetic peptide
WYQQKPGKAPKLLIY

SEQ ID NO: 2699 - protein, 15 aa, Artificial Sequence
  Description of Artificial Sequence: Synthetic peptide
WYQQKPGKAPKLLIY

SEQ ID NO: 2700 - protein, 15 aa, Artificial Sequence
  Description of Artificial Sequence: Synthetic peptide
WYQQKPGKAPKLLIY

SEQ ID NO: 2701 - protein, 15 aa, Artificial Sequence
  Description of Artificial Sequence: Synthetic peptide
WYQQKPGKAPKLLIY

SEQ ID NO: 2702 - protein, 15 aa, Artificial Sequence
  Description of Artificial Sequence: Synthetic peptide
WYQQKPGKAPKLLIY

SEQ ID NO: 2703 - protein, 15 aa, Artificial Sequence
  Description of Artificial Sequence: Synthetic peptide
WYQQKPGKAPKLLIY

SEQ ID NO: 2704 - protein, 15 aa, Artificial Sequence
  Description of Artificial Sequence: Synthetic peptide
WYQQKPGKAPKLLIY

SEQ ID NO: 2705 - protein, 15 aa, Artificial Sequence
  Description of Artificial Sequence: Synthetic peptide
WYQQKPGKAPKLLIY

SEQ ID NO: 2706 - protein, 15 aa, Artificial Sequence
  Description of Artificial Sequence: Synthetic peptide
WYQQKPGKAPKLLIY

SEQ ID NO: 2707 - protein, 15 aa, Artificial Sequence
  Description of Artificial Sequence: Synthetic peptide
WYQQKPGKAPKLLIY

SEQ ID NO: 2708 - protein, 15 aa, Artificial Sequence
  Description of Artificial Sequence: Synthetic peptide
WYQQKPGKAPKLLIY

SEQ ID NO: 2709 - protein, 15 aa, Artificial Sequence
  Description of Artificial Sequence: Synthetic peptide
WYQQKPGKAPKLLIY

SEQ ID NO: 2710 - protein, 15 aa, Artificial Sequence
  Description of Artificial Sequence: Synthetic peptide
WYQQKPGKAPKLLIY

SEQ ID NO: 2711 - protein, 7 aa, Artificial Sequence
  Description of Artificial Sequence: Synthetic peptide
AASSLQS

SEQ ID NO: 2712 - protein, 7 aa, Artificial Sequence
  Description of Artificial Sequence: Synthetic peptide
AASSLQS

SEQ ID NO: 2713 - protein, 7 aa, Artificial Sequence
  Description of Artificial Sequence: Synthetic peptide
AASSLQS

SEQ ID NO: 2714 - protein, 7 aa, Artificial Sequence
  Description of Artificial Sequence: Synthetic peptide
AASSLQS

SEQ ID NO: 2715 - protein, 7 aa, Artificial Sequence
  Description of Artificial Sequence: Synthetic peptide
AASSLQS

SEQ ID NO: 2716 - protein, 7 aa, Artificial Sequence
  Description of Artificial Sequence: Synthetic peptide
AASSLQS

SEQ ID NO: 2717 - protein, 7 aa, Artificial Sequence
  Description of Artificial Sequence: Synthetic peptide
AASSLQS

SEQ ID NO: 2718 - protein, 7 aa, Artificial Sequence
  Description of Artificial Sequence: Synthetic peptide
AASSLQS

SEQ ID NO: 2719 - protein, 7 aa, Artificial Sequence
  Description of Artificial Sequence: Synthetic peptide
AASSLQS

SEQ ID NO: 2720 - protein, 7 aa, Artificial Sequence
  Description of Artificial Sequence: Synthetic peptide
AASSLQS

SEQ ID NO: 2721 - protein, 7 aa, Artificial Sequence
  Description of Artificial Sequence: Synthetic peptide
AASSLQS

SEQ ID NO: 2722 - protein, 7 aa, Artificial Sequence
  Description of Artificial Sequence: Synthetic peptide
AASSLQS

SEQ ID NO: 2723 - protein, 7 aa, Artificial Sequence
  Description of Artificial Sequence: Synthetic peptide
AASSLQS

SEQ ID NO: 2724 - protein, 7 aa, Artificial Sequence
  Description of Artificial Sequence: Synthetic peptide
AASSLQS

SEQ ID NO: 2725 - protein, 7 aa, Artificial Sequence
  Description of Artificial Sequence: Synthetic peptide
AASSLQS

SEQ ID NO: 2726 - protein, 7 aa, Artificial Sequence
  Description of Artificial Sequence: Synthetic peptide
AASSLQS

SEQ ID NO: 2727 - protein, 7 aa, Artificial Sequence
  Description of Artificial Sequence: Synthetic peptide
AASSLQS

SEQ ID NO: 2728 - protein, 7 aa, Artificial Sequence
  Description of Artificial Sequence: Synthetic peptide
AASSLQS

SEQ ID NO: 2729 - protein, 7 aa, Artificial Sequence
  Description of Artificial Sequence: Synthetic peptide
AASSLQS

SEQ ID NO: 2730 - protein, 7 aa, Artificial Sequence
  Description of Artificial Sequence: Synthetic peptide
AASSLQS

SEQ ID NO: 2731 - protein, 7 aa, Artificial Sequence
  Description of Artificial Sequence: Synthetic peptide
AASSLQS

SEQ ID NO: 2732 - protein, 7 aa, Artificial Sequence
  Description of Artificial Sequence: Synthetic peptide
AASSLQS

SEQ ID NO: 2733 - protein, 32 aa, Artificial Sequence; identical to SEQ ID NO: 186
  Description of Artificial Sequence: Synthetic polypeptide

SEQ ID NO: 2734 - protein, 32 aa, Artificial Sequence; identical to SEQ ID NO: 186
  Description of Artificial Sequence: Synthetic polypeptide

SEQ ID NO: 2735 - protein, 32 aa, Artificial Sequence; identical to SEQ ID NO: 186
  Description of Artificial Sequence: Synthetic polypeptide

SEQ ID NO: 2736 - protein, 32 aa, Artificial Sequence; identical to SEQ ID NO: 186
  Description of Artificial Sequence: Synthetic polypeptide

SEQ ID NO: 2737 - protein, 32 aa, Artificial Sequence; identical to SEQ ID NO: 186
  Description of Artificial Sequence: Synthetic polypeptide

SEQ ID NO: 2738 - protein, 32 aa, Artificial Sequence; identical to SEQ ID NO: 186
  Description of Artificial Sequence: Synthetic polypeptide

SEQ ID NO: 2739 - protein, 32 aa, Artificial Sequence; identical to SEQ ID NO: 186
  Description of Artificial Sequence: Synthetic polypeptide

SEQ ID NO: 2740 - protein, 32 aa, Artificial Sequence; identical to SEQ ID NO: 186
  Description of Artificial Sequence: Synthetic polypeptide

SEQ ID NO: 2741 - protein, 32 aa, Artificial Sequence; identical to SEQ ID NO: 186
  Description of Artificial Sequence: Synthetic polypeptide

SEQ ID NO: 2742 - protein, 32 aa, Artificial Sequence; identical to SEQ ID NO: 186
  Description of Artificial Sequence: Synthetic polypeptide

SEQ ID NO: 2743 - protein, 32 aa, Artificial Sequence; identical to SEQ ID NO: 186
  Description of Artificial Sequence: Synthetic polypeptide

SEQ ID NO: 2744 - protein, 32 aa, Artificial Sequence; identical to SEQ ID NO: 186
  Description of Artificial Sequence: Synthetic polypeptide

SEQ ID NO: 2745 - protein, 32 aa, Artificial Sequence; identical to SEQ ID NO: 186
  Description of Artificial Sequence: Synthetic polypeptide

SEQ ID NO: 2746 - protein, 32 aa, Artificial Sequence; identical to SEQ ID NO: 186
  Description of Artificial Sequence: Synthetic polypeptide

SEQ ID NO: 2747 - protein, 32 aa, Artificial Sequence; identical to SEQ ID NO: 186
  Description of Artificial Sequence: Synthetic polypeptide

SEQ ID NO: 2748 - protein, 32 aa, Artificial Sequence; identical to SEQ ID NO: 186
  Description of Artificial Sequence: Synthetic polypeptide

SEQ ID NO: 2749 - protein, 32 aa, Artificial Sequence; identical to SEQ ID NO: 186
  Description of Artificial Sequence: Synthetic polypeptide

SEQ ID NO: 2750 - protein, 32 aa, Artificial Sequence; identical to SEQ ID NO: 186
  Description of Artificial Sequence: Synthetic polypeptide

SEQ ID NO: 2751 - protein, 32 aa, Artificial Sequence; identical to SEQ ID NO: 186
  Description of Artificial Sequence: Synthetic polypeptide

SEQ ID NO: 2752 - protein, 32 aa, Artificial Sequence; identical to SEQ ID NO: 186
  Description of Artificial Sequence: Synthetic polypeptide

SEQ ID NO: 2753 - protein, 32 aa, Artificial Sequence; identical to SEQ ID NO: 186
  Description of Artificial Sequence: Synthetic polypeptide

SEQ ID NO: 2754 - protein, 32 aa, Artificial Sequence; identical to SEQ ID NO: 186
  Description of Artificial Sequence: Synthetic polypeptide

SEQ ID NO: 2755 - protein, 5 aa, Artificial Sequence
  Description of Artificial Sequence: Synthetic peptide
QQAGI

SEQ ID NO: 2756 - protein, 5 aa, Artificial Sequence
  Description of Artificial Sequence: Synthetic peptide
QQAGI

SEQ ID NO: 2757 - protein, 5 aa, Artificial Sequence
  Description of Artificial Sequence: Synthetic peptide
QQAGI

SEQ ID NO: 2758 - protein, 5 aa, Artificial Sequence
  Description of Artificial Sequence: Synthetic peptide
QQAGI

SEQ ID NO: 2759 - protein, 5 aa, Artificial Sequence
  Description of Artificial Sequence: Synthetic peptide
QQAGI

SEQ ID NO: 2760 - protein, 5 aa, Artificial Sequence
  Description of Artificial Sequence: Synthetic peptide
QQAGI

SEQ ID NO: 2761 - protein, 5 aa, Artificial Sequence
  Description of Artificial Sequence: Synthetic peptide
QQAGI

SEQ ID NO: 2762 - protein, 5 aa, Artificial Sequence
  Description of Artificial Sequence: Synthetic peptide
QQAGI

SEQ ID NO: 2763 - protein, 5 aa, Artificial Sequence
  Description of Artificial Sequence: Synthetic peptide
QQAGI

SEQ ID NO: 2764 - protein, 5 aa, Artificial Sequence
  Description of Artificial Sequence: Synthetic peptide
QQAGI

SEQ ID NO: 2765 - protein, 5 aa, Artificial Sequence
  Description of Artificial Sequence: Synthetic peptide
QQAGI

SEQ ID NO: 2766 - protein, 5 aa, Artificial Sequence
  Description of Artificial Sequence: Synthetic peptide
QQAGI

SEQ ID NO: 2767 - protein, 5 aa, Artificial Sequence
  Description of Artificial Sequence: Synthetic peptide
QQAGI

SEQ ID NO: 2768 - protein, 5 aa, Artificial Sequence
  Description of Artificial Sequence: Synthetic peptide
QQAGI

SEQ ID NO: 2769 - protein, 5 aa, Artificial Sequence
  Description of Artificial Sequence: Synthetic peptide
QQAGI

SEQ ID NO: 2770 - protein, 5 aa, Artificial Sequence
  Description of Artificial Sequence: Synthetic peptide
QQAGI

SEQ ID NO: 2771 - protein, 5 aa, Artificial Sequence
  Description of Artificial Sequence: Synthetic peptide
QQAGI

SEQ ID NO: 2772 - protein, 5 aa, Artificial Sequence
  Description of Artificial Sequence: Synthetic peptide
QQAGI

SEQ ID NO: 2773 - protein, 5 aa, Artificial Sequence
  Description of Artificial Sequence: Synthetic peptide
QQAGI

SEQ ID NO: 2774 - protein, 5 aa, Artificial Sequence
  Description of Artificial Sequence: Synthetic peptide
QQAGI

SEQ ID NO: 2775 - protein, 5 aa, Artificial Sequence
  Description of Artificial Sequence: Synthetic peptide
QQAGI

SEQ ID NO: 2776 - protein, 5 aa, Artificial Sequence
  Description of Artificial Sequence: Synthetic peptide
QQAGI

SEQ ID NO: 2777 - protein, 10 aa, Artificial Sequence
  Description of Artificial Sequence: Synthetic peptide
FGQGTKLEIK

SEQ ID NO: 2778 - protein, 10 aa, Artificial Sequence
  Description of Artificial Sequence: Synthetic peptide
FGQGTKLEIK

SEQ ID NO: 2779 - protein, 10 aa, Artificial Sequence
  Description of Artificial Sequence: Synthetic peptide
FGQGTKLEIK

SEQ ID NO: 2780 - protein, 10 aa, Artificial Sequence
  Description of Artificial Sequence: Synthetic peptide
FGQGTKLEIK

SEQ ID NO: 2781 - protein, 10 aa, Artificial Sequence
  Description of Artificial Sequence: Synthetic peptide
FGQGTKLEIK

SEQ ID NO: 2782 - protein, 10 aa, Artificial Sequence
  Description of Artificial Sequence: Synthetic peptide
FGQGTKLEIK

SEQ ID NO: 2783 - protein, 10 aa, Artificial Sequence
  Description of Artificial Sequence: Synthetic peptide
FGQGTKLEIK

SEQ ID NO: 2784 - protein, 10 aa, Artificial Sequence
  Description of Artificial Sequence: Synthetic peptide
FGQGTKLEIK

SEQ ID NO: 2785 - protein, 10 aa, Artificial Sequence
  Description of Artificial Sequence: Synthetic peptide
FGQGTKLEIK

SEQ ID NO: 2786 - protein, 10 aa, Artificial Sequence
  Description of Artificial Sequence: Synthetic peptide
FGQGTKLEIK

SEQ ID NO: 2787 - protein, 10 aa, Artificial Sequence
  Description of Artificial Sequence: Synthetic peptide
FGQGTKLEIK

SEQ ID NO: 2788 - protein, 10 aa, Artificial Sequence
  Description of Artificial Sequence: Synthetic peptide
FGQGTKLEIK

SEQ ID NO: 2789 - protein, 10 aa, Artificial Sequence
  Description of Artificial Sequence: Synthetic peptide
FGQGTKLEIK

SEQ ID NO: 2790 - protein, 10 aa, Artificial Sequence
  Description of Artificial Sequence: Synthetic peptide
FGQGTKLEIK

SEQ ID NO: 2791 - protein, 10 aa, Artificial Sequence
  Description of Artificial Sequence: Synthetic peptide
FGQGTKLEIK

SEQ ID NO: 2792 - protein, 10 aa, Artificial Sequence
  Description of Artificial Sequence: Synthetic peptide
FGQGTKLEIK

SEQ ID NO: 2793 - protein, 10 aa, Artificial Sequence
  Description of Artificial Sequence: Synthetic peptide
FGQGTKLEIK

SEQ ID NO: 2794 - protein, 10 aa, Artificial Sequence
  Description of Artificial Sequence: Synthetic peptide
FGQGTKLEIK

SEQ ID NO: 2795 - protein, 10 aa, Artificial Sequence
  Description of Artificial Sequence: Synthetic peptide
FGQGTKLEIK

SEQ ID NO: 2796 - protein, 10 aa, Artificial Sequence
  Description of Artificial Sequence: Synthetic peptide
FGQGTKLEIK

SEQ ID NO: 2797 - protein, 10 aa, Artificial Sequence
  Description of Artificial Sequence: Synthetic peptide
FGQGTKLEIK

SEQ ID NO: 2798 - protein, 10 aa, Artificial Sequence
  Description of Artificial Sequence: Synthetic peptide
FGQGTKLEIK

SEQ ID NO: 2799 - protein, 107 aa, Artificial Sequence [sequence omitted]

SEQ ID NO: 2800 - protein, 107 aa, Artificial Sequence [sequence omitted]

SEQ ID NO: 2801 - protein, 107 aa, Artificial Sequence [sequence omitted]

SEQ ID NO: 2802 - protein, 107 aa, Artificial Sequence [sequence omitted]

SEQ ID NO: 2803 - protein, 7 aa, Artificial Sequence
  Description of Artificial Sequence: Synthetic peptide
RTVAAPS

SEQ ID NO: 2804 - protein, 107 aa, Artificial Sequence
  Description of Artificial Sequence: Synthetic polypeptide
RTVAAPSVFIFPPSDEQLKSGTASVVCLLNNFYPREAKVQWKVDNALQSGNSQESVTEQDSKDSZYSLSSTLTLSKADYEKHKVYACEVTHQGLSSPVTKSFNRGEC

SEQ ID NO: 2805 - protein, 107 aa, Artificial Sequence; identical to SEQ ID NO: 2804
  Description of Artificial Sequence: Synthetic polypeptide

SEQ ID NO: 2806 - protein, 107 aa, Artificial Sequence
  Description of Artificial Sequence: Synthetic polypeptide
RTVAAPSVFIFPPSDEQLKSGTASVVCLLNNFYPREAKVQWKVDNALQSGNSQESVTEQDSKDZZYSLSSTLTLSKADYEKHKVYACEVTHQGLSSPVTKSFNRGEC

SEQ ID NO: 2807 - protein, 109 aa, Artificial Sequence
  Description of Artificial Sequence: Synthetic polypeptide
RTVAAPSVFIFPPSDEQLKSGTASVVCLLNNFYPREAKVQWKVDNALQSGNSQESVTEQDSKDSZLLPVQHPDPVQGRLREAQGVRLRGDPPGPVLPRDQVLQPGRVLM

SEQ ID NO: 2808 - protein, 107 aa, Artificial Sequence; identical to SEQ ID NO: 2804
  Description of Artificial Sequence: Synthetic polypeptide

SEQ ID NO: 2809 - protein, 107 aa, Artificial Sequence; identical to SEQ ID NO: 2806
  Description of Artificial Sequence: Synthetic polypeptide

SEQ ID NO: 2810 - protein, 107 aa, Artificial Sequence; identical to SEQ ID NO: 2806
  Description of Artificial Sequence: Synthetic polypeptide

SEQ ID NO: 2811 - protein, 107 aa, Artificial Sequence; identical to SEQ ID NO: 2806
  Description of Artificial Sequence: Synthetic polypeptide

SEQ ID NO: 2812 - protein, 7 aa, Artificial Sequence
  Description of Artificial Sequence: Synthetic peptide
RTVAAPS

SEQ ID NO: 2813 - protein, 19 aa, Artificial Sequence
  Description of Artificial Sequence: Synthetic peptide
MGWSCIILFLVATATGAHS

SEQ ID NO: 2814 - protein, 19 aa, Artificial Sequence
  Description of Artificial Sequence: Synthetic peptide
MGWSCIILFLVATATGAHS

SEQ ID NO: 2815 - protein, 19 aa, Artificial Sequence
  Description of Artificial Sequence: Synthetic peptide
MGWSCIILFLVATATGAHS

SEQ ID NO: 2816 - protein, 19 aa, Artificial Sequence
  Description of Artificial Sequence: Synthetic peptide
MGWSCIILFLVATATGAHS

SEQ ID NO: 2817 - protein, 19 aa, Artificial Sequence
  Description of Artificial Sequence: Synthetic peptide
MGWSCIILFLVATATGAHS

SEQ ID NO: 2818 - protein, 19 aa, Artificial Sequence
  Description of Artificial Sequence: Synthetic peptide
MGWSCIILFLVATATGAHS

SEQ ID NO: 2819 - protein, 19 aa, Artificial Sequence
  Description of Artificial Sequence: Synthetic peptide
MGWSCIILFLVATATGAHS

SEQ ID NO: 2820 - protein, 19 aa, Artificial Sequence
  Description of Artificial Sequence: Synthetic peptide
MGWSCIILFLVATATGAHS

SEQ ID NO: 2821 - protein, 19 aa, Artificial Sequence
  Description of Artificial Sequence: Synthetic peptide
MGWSCIILFLVATATGAHS

SEQ ID NO: 2822 - protein, 19 aa, Artificial Sequence
  Description of Artificial Sequence: Synthetic peptide
MGWSCIILFLVATATGAHS

SEQ ID NO: 2823 - protein, 19 aa, Artificial Sequence
  Description of Artificial Sequence: Synthetic peptide
MGWSCIILFLVATATGAHS

SEQ ID NO: 2824 - protein, 19 aa, Artificial Sequence
  Description of Artificial Sequence: Synthetic peptide
MGWSCIILFLVATATGAHS

SEQ ID NO: 2825 - protein, 19 aa, Artificial Sequence
  Description of Artificial Sequence: Synthetic peptide
MGWSCIILFLVATATGAHS

SEQ ID NO: 2826 - protein, 19 aa, Artificial Sequence
  Description of Artificial Sequence: Synthetic peptide
MGWSCIILFLVATATGAHS

SEQ ID NO: 2827 - protein, 19 aa, Artificial Sequence
  Description of Artificial Sequence: Synthetic peptide
MGWSCIILFLVATATGAHS

SEQ ID NO: 2828 - protein, 19 aa, Artificial Sequence
  Description of Artificial Sequence: Synthetic peptide
MGWSCIILFLVATATGAHS

SEQ ID NO: 2829 - protein, 19 aa, Artificial Sequence
  Description of Artificial Sequence: Synthetic peptide
MGWSCIILFLVATATGAHS

SEQ ID NO: 2830 - protein, 19 aa, Artificial Sequence
  Description of Artificial Sequence: Synthetic peptide
MGWSCIILFLVATATGAHS

SEQ ID NO: 2831 - protein, 19 aa, Artificial Sequence
  Description of Artificial Sequence: Synthetic peptide
MGWSCIILFLVATATGAHS

SEQ ID NO: 2832 - protein, 19 aa, Artificial Sequence
  Description of Artificial Sequence: Synthetic peptide
MGWSCIILFLVATATGAHS

SEQ ID NO: 2833 - protein, 19 aa, Artificial Sequence
  Description of Artificial Sequence: Synthetic peptide
MGWSCIILFLVATATGAHS

SEQ ID NO: 2834 - protein, 19 aa, Artificial Sequence
  Description of Artificial Sequence: Synthetic peptide
MGWSCIILFLVATATGAHS

SEQ ID NO: 2835 - protein, 30 aa, Artificial Sequence; identical to SEQ ID NO: 322
  Description of Artificial Sequence: Synthetic polypeptide

SEQ ID NO: 2836 - protein, 30 aa, Artificial Sequence; identical to SEQ ID NO: 322
  Description of Artificial Sequence: Synthetic polypeptide

SEQ ID NO: 2837 - protein, 30 aa, Artificial Sequence; identical to SEQ ID NO: 322
  Description of Artificial Sequence: Synthetic polypeptide

SEQ ID NO: 2838 - protein, 30 aa, Artificial Sequence; identical to SEQ ID NO: 322
  Description of Artificial Sequence: Synthetic polypeptide

SEQ ID NO: 2839 - protein, 30 aa, Artificial Sequence; identical to SEQ ID NO: 322
  Description of Artificial Sequence: Synthetic polypeptide

SEQ ID NO: 2840 - protein, 30 aa, Artificial Sequence; identical to SEQ ID NO: 322
  Description of Artificial Sequence: Synthetic polypeptide

SEQ ID NO: 2841 - protein, 30 aa, Artificial Sequence; identical to SEQ ID NO: 322
  Description of Artificial Sequence: Synthetic polypeptide

SEQ ID NO: 2842 - protein, 30 aa, Artificial Sequence; identical to SEQ ID NO: 322
  Description of Artificial Sequence: Synthetic polypeptide

SEQ ID NO: 2843 - protein, 30 aa, Artificial Sequence; identical to SEQ ID NO: 322
  Description of Artificial Sequence: Synthetic polypeptide

SEQ ID NO: 2844 - protein, 30 aa, Artificial Sequence; identical to SEQ ID NO: 322
  Description of Artificial Sequence: Synthetic polypeptide

SEQ ID NO: 2845 - protein, 30 aa, Artificial Sequence; identical to SEQ ID NO: 322
  Description of Artificial Sequence: Synthetic polypeptide

SEQ ID NO: 2846 - protein, 30 aa, Artificial Sequence; identical to SEQ ID NO: 322
  Description of Artificial Sequence: Synthetic polypeptide

SEQ ID NO: 2847 - protein, 30 aa, Artificial Sequence; identical to SEQ ID NO: 322
  Description of Artificial Sequence: Synthetic polypeptide

SEQ ID NO: 2848 - protein, 30 aa, Artificial Sequence; identical to SEQ ID NO: 322
  Description of Artificial Sequence: Synthetic polypeptide

SEQ ID NO: 2849 - protein, 30 aa, Artificial Sequence; identical to SEQ ID NO: 322
  Description of Artificial Sequence: Synthetic polypeptide

SEQ ID NO: 2850 - protein, 30 aa, Artificial Sequence; identical to SEQ ID NO: 322
  Description of Artificial Sequence: Synthetic polypeptide

SEQ ID NO: 2851 - protein, 30 aa, Artificial Sequence; identical to SEQ ID NO: 322
  Description of Artificial Sequence: Synthetic polypeptide

SEQ ID NO: 2852 - protein, 30 aa, Artificial Sequence; identical to SEQ ID NO: 322
  Description of Artificial Sequence: Synthetic polypeptide

SEQ ID NO: 2853 - protein, 30 aa, Artificial Sequence; identical to SEQ ID NO: 322
  Description of Artificial Sequence: Synthetic polypeptide

SEQ ID NO: 2854 - protein, 30 aa, Artificial Sequence; identical to SEQ ID NO: 322
  Description of Artificial Sequence: Synthetic polypeptide

SEQ ID NO: 2855 - protein, 30 aa, Artificial Sequence; identical to SEQ ID NO: 322
  Description of Artificial Sequence: Synthetic polypeptide

SEQ ID NO: 2856 - protein, 30 aa, Artificial Sequence; identical to SEQ ID NO: 322
  Description of Artificial Sequence: Synthetic polypeptide

SEQ ID NO: 2857 - protein, 5 aa, Artificial Sequence
  Description of Artificial Sequence: Synthetic peptide
DYWMH

SEQ ID NO: 2858 - protein, 5 aa, Artificial Sequence
  Description of Artificial Sequence: Synthetic peptide
WYWMH

SEQ ID NO: 2859 - protein, 5 aa, Artificial Sequence
  Description of Artificial Sequence: Synthetic peptide
DYWMH

SEQ ID NO: 2860 - protein, 5 aa, Artificial Sequence
  Description of Artificial Sequence: Synthetic peptide
WYWMH

SEQ ID NO: 2861 - protein, 5 aa, Artificial Sequence
  Description of Artificial Sequence: Synthetic peptide
WYWMH

SEQ ID NO: 2862 - protein, 5 aa, Artificial Sequence
  Description of Artificial Sequence: Synthetic peptide
WYWMH

SEQ ID NO: 2863 - protein, 5 aa, Artificial Sequence
  Description of Artificial Sequence: Synthetic peptide
WYWMH

SEQ ID NO: 2864 - protein, 5 aa, Artificial Sequence
  Description of Artificial Sequence: Synthetic peptide
DYWMH

SEQ ID NO: 2865 - protein, 5 aa, Artificial Sequence
  Description of Artificial Sequence: Synthetic peptide
WYWMH

SEQ ID NO: 2866 - protein, 5 aa, Artificial Sequence
  Description of Artificial Sequence: Synthetic peptide
WYWMH

SEQ ID NO: 2867 - protein, 5 aa, Artificial Sequence
  Description of Artificial Sequence: Synthetic peptide
DYNMH

SEQ ID NO: 2868 - protein, 5 aa, Artificial Sequence
  Description of Artificial Sequence: Synthetic peptide
WYGMH

SEQ ID NO: 2869 - protein, 5 aa, Artificial Sequence
  Description of Artificial Sequence: Synthetic peptide
WYWMH

SEQ ID NO: 2870 - protein, 5 aa, Artificial Sequence
  Description of Artificial Sequence: Synthetic peptide
DYWMH

SEQ ID NO: 2871 - protein, 5 aa, Artificial Sequence
  Description of Artificial Sequence: Synthetic peptide
WYWMH

SEQ ID NO: 2872 - protein, 5 aa, Artificial Sequence
  Description of Artificial Sequence: Synthetic peptide
DYWMH

SEQ ID NO: 2873 - protein, 5 aa, Artificial Sequence
  Description of Artificial Sequence: Synthetic peptide
WYWMH

SEQ ID NO: 2874 - protein, 5 aa, Artificial Sequence
  Description of Artificial Sequence: Synthetic peptide
WYWMH

SEQ ID NO: 2875 - protein, 5 aa, Artificial Sequence
  Description of Artificial Sequence: Synthetic peptide
WYWMH

SEQ ID NO: 2876 - protein, 5 aa, Artificial Sequence
  Description of Artificial Sequence: Synthetic peptide
WYWMH

SEQ ID NO: 2877 - protein, 5 aa, Artificial Sequence
  Description of Artificial Sequence: Synthetic peptide
DYWMH

SEQ ID NO: 2878 - protein, 5 aa, Artificial Sequence
  Description of Artificial Sequence: Synthetic peptide
WYWMH

SEQ ID NO: 2879 - protein, 14 aa, Artificial Sequence
  Description of Artificial Sequence: Synthetic peptide
WVRQAPGKGLEWVS

SEQ ID NO: 2880 - protein, 14 aa, Artificial Sequence
  Description of Artificial Sequence: Synthetic peptide
WVRQAPGKGLEWVS

SEQ ID NO: 2881 - protein, 14 aa, Artificial Sequence
  Description of Artificial Sequence: Synthetic peptide
WVRQAPGKGLEWVS

SEQ ID NO: 2882 - protein, 14 aa, Artificial Sequence
  Description of Artificial Sequence: Synthetic peptide
WVRQAPGKGLEWVS

SEQ ID NO: 2883 - protein, 14 aa, Artificial Sequence
  Description of Artificial Sequence: Synthetic peptide
WVRQAPGKGLEWVS

SEQ ID NO: 2884 - protein, 14 aa, Artificial Sequence
  Description of Artificial Sequence: Synthetic peptide
WVRQAPGKGLEWVS

SEQ ID NO: 2885 - protein, 14 aa, Artificial Sequence
  Description of Artificial Sequence: Synthetic peptide
WVRQAPGKGLEWVS

SEQ ID NO: 2886 - protein, 14 aa, Artificial Sequence
  Description of Artificial Sequence: Synthetic peptide
WVRQAPGKGLEWVS

SEQ ID NO: 2887 - protein, 14 aa, Artificial Sequence
  Description of Artificial Sequence: Synthetic peptide
WVRQAPGKGLEWVS

SEQ ID NO: 2888 - protein, 14 aa, Artificial Sequence
  Description of Artificial Sequence: Synthetic peptide
WVRQAPGKGLEWVS

SEQ ID NO: 2889 - protein, 14 aa, Artificial Sequence
  Description of Artificial Sequence: Synthetic peptide
WVRQAPGKGLEWVS

SEQ ID NO: 2890 - protein, 14 aa, Artificial Sequence
  Description of Artificial Sequence: Synthetic peptide
WVRQAPGKGLEWVS

SEQ ID NO: 2891 - protein, 14 aa, Artificial Sequence
  Description of Artificial Sequence: Synthetic peptide
WVRQAPGKGLEWVS

SEQ ID NO: 2892 - protein, 14 aa, Artificial Sequence
  Description of Artificial Sequence: Synthetic peptide
WVRQAPGKGLEWVS

SEQ ID NO: 2893 - protein, 14 aa, Artificial Sequence
  Description of Artificial Sequence: Synthetic peptide
WVRQAPGKGLEWVS

SEQ ID NO: 2894 - protein, 14 aa, Artificial Sequence
  Description of Artificial Sequence: Synthetic peptide
WVRQAPGKGLEWVS

SEQ ID NO: 2895 - protein, 14 aa, Artificial Sequence
  Description of Artificial Sequence: Synthetic peptide
WVRQAPGKGLEWVS

SEQ ID NO: 2896 - protein, 14 aa, Artificial Sequence
  Description of Artificial Sequence: Synthetic peptide
WVRQAPGKGLEWVS

SEQ ID NO: 2897 - protein, 14 aa, Artificial Sequence
  Description of Artificial Sequence: Synthetic peptide
WVRQAPGKGLEWVS

SEQ ID NO: 2898 - protein, 14 aa, Artificial Sequence
  Description of Artificial Sequence: Synthetic peptide
WVRQAPGKGLEWVS

SEQ ID NO: 2899 - protein, 14 aa, Artificial Sequence
  Description of Artificial Sequence: Synthetic peptide
WVRQAPGKGLEWVS

SEQ ID NO: 2900 - protein, 14 aa, Artificial Sequence
  Description of Artificial Sequence: Synthetic peptide
WVRQAPGKGLEWVS

SEQ ID NO: 2901 - protein, 17 aa, Artificial Sequence
  Description of Artificial Sequence: Synthetic peptide
GISPSGGYTHYADSVKG

SEQ ID NO: 2902 - protein, 17 aa, Artificial Sequence
  Description of Artificial Sequence: Synthetic peptide
GISPSGGMTHYADSVKG

SEQ ID NO: 2903 - protein, 17 aa, Artificial Sequence
  Description of Artificial Sequence: Synthetic peptide
GISPSGGYTHYADSVKG

SEQ ID NO: 2904 - protein, 17 aa, Artificial Sequence
  Description of Artificial Sequence: Synthetic peptide
GISPSGGMTMYADSVKG

SEQ ID NO: 2905 - protein, 17 aa, Artificial Sequence
  Description of Artificial Sequence: Synthetic peptide
GISPSGGMTMYADSVKG

SEQ ID NO: 2906 - protein, 17 aa, Artificial Sequence
  Description of Artificial Sequence: Synthetic peptide
GISPSGGYTMYADSVKG

SEQ ID NO: 2907 - protein, 17 aa, Artificial Sequence
  Description of Artificial Sequence: Synthetic peptide
GISPSGGMTMYADSVKG

SEQ ID NO: 2908 - protein, 17 aa, Artificial Sequence
  Description of Artificial Sequence: Synthetic peptide
GISPSGGMTMYADSVKG

SEQ ID NO: 2909 - protein, 17 aa, Artificial Sequence
  Description of Artificial Sequence: Synthetic peptide
GISPSGGMTMYADSVKG

SEQ ID NO: 2910 - protein, 17 aa, Artificial Sequence
  Description of Artificial Sequence: Synthetic peptide
GISPSGGMTMYADSVKG

SEQ ID NO: 2911 - protein, 17 aa, Artificial Sequence
  Description of Artificial Sequence: Synthetic peptide
YIGPSGGYTHYADSVKG

SEQ ID NO: 2912 - protein, 17 aa, Artificial Sequence
  Description of Artificial Sequence: Synthetic peptide
GIVSSGGETFYADSVKG

SEQ ID NO: 2913 - protein, 17 aa, Artificial Sequence
  Description of Artificial Sequence: Synthetic peptide
GISPSGGMTMYADSVKG

SEQ ID NO: 2914 - protein, 17 aa, Artificial Sequence
  Description of Artificial Sequence: Synthetic peptide
GISPSGGYTHYADSVKG

SEQ ID NO: 2915 - protein, 17 aa, Artificial Sequence
  Description of Artificial Sequence: Synthetic peptide
GISPSGGMTMYADSVKG

SEQ ID NO: 2916 - protein, 17 aa, Artificial Sequence
  Description of Artificial Sequence: Synthetic peptide
GISPSGGYTHYADSVKG

SEQ ID NO: 2917 - protein, 17 aa, Artificial Sequence
  Description of Artificial Sequence: Synthetic peptide
GISPSGGMTMYADSVKG

SEQ ID NO: 2918 - protein, 17 aa, Artificial Sequence
  Description of Artificial Sequence: Synthetic peptide
GISPSGGMTMYADSVKG

SEQ ID NO: 2919 - protein, 17 aa, Artificial Sequence
  Description of Artificial Sequence: Synthetic peptide
GISPSGGMTMYADSVKG

SEQ ID NO: 2920 - protein, 17 aa, Artificial Sequence
  Description of Artificial Sequence: Synthetic peptide
GISPSGGMTMYADSVKG

SEQ ID NO: 2921 - protein, 17 aa, Artificial Sequence
  Description of Artificial Sequence: Synthetic peptide
GISPSGGMTMYADSVKG

SEQ ID NO: 2922 - protein, 17 aa, Artificial Sequence
  Description of Artificial Sequence: Synthetic peptide
GISPSGGYTMYADSVKG

SEQ ID NO: 2923 - protein, 32 aa, Artificial Sequence; identical to SEQ ID NO: 952
  Description of Artificial Sequence: Synthetic polypeptide

SEQ ID NO: 2924 - protein, 32 aa, Artificial Sequence; identical to SEQ ID NO: 952
  Description of Artificial Sequence: Synthetic polypeptide

SEQ ID NO: 2925 - protein, 32 aa, Artificial Sequence; identical to SEQ ID NO: 952
  Description of Artificial Sequence: Synthetic polypeptide

SEQ ID NO: 2926 - protein, 32 aa, Artificial Sequence; identical to SEQ ID NO: 952
  Description of Artificial Sequence: Synthetic polypeptide

SEQ ID NO: 2927 - protein, 32 aa, Artificial Sequence; identical to SEQ ID NO: 952
  Description of Artificial Sequence: Synthetic polypeptide

SEQ ID NO: 2928 - protein, 32 aa, Artificial Sequence; identical to SEQ ID NO: 952
  Description of Artificial Sequence: Synthetic polypeptide

SEQ ID NO: 2929 - protein, 32 aa, Artificial Sequence; identical to SEQ ID NO: 952
  Description of Artificial Sequence: Synthetic polypeptide

SEQ ID NO: 2930 - protein, 32 aa, Artificial Sequence; identical to SEQ ID NO: 952
  Description of Artificial Sequence: Synthetic polypeptide

SEQ ID NO: 2931 - protein, 32 aa, Artificial Sequence; identical to SEQ ID NO: 952
  Description of Artificial Sequence: Synthetic polypeptide

SEQ ID NO: 2932 - protein, 32 aa, Artificial Sequence; identical to SEQ ID NO: 952
  Description of Artificial Sequence: Synthetic polypeptide

SEQ ID NO: 2933 - protein, 32 aa, Artificial Sequence; identical to SEQ ID NO: 458
  Description of Artificial Sequence: Synthetic polypeptide

SEQ ID NO: 2934 - protein, 32 aa, Artificial Sequence; identical to SEQ ID NO: 458
  Description of Artificial Sequence: Synthetic polypeptide

SEQ ID NO: 2935 - protein, 32 aa, Artificial Sequence; identical to SEQ ID NO: 952
  Description of Artificial Sequence: Synthetic polypeptide

SEQ ID NO: 2936 - protein, 32 aa, Artificial Sequence; identical to SEQ ID NO: 952
  Description of Artificial Sequence: Synthetic polypeptide

SEQ ID NO: 2937 - protein, 32 aa, Artificial Sequence; identical to SEQ ID NO: 952
  Description of Artificial Sequence: Synthetic polypeptide

SEQ ID NO: 2938 - protein, 32 aa, Artificial Sequence; identical to SEQ ID NO: 952
  Description of Artificial Sequence: Synthetic polypeptide

SEQ ID NO: 2939 - protein, 32 aa, Artificial Sequence; identical to SEQ ID NO: 952
  Description of Artificial Sequence: Synthetic polypeptide

SEQ ID NO: 2940 - protein, 32 aa, Artificial Sequence; identical to SEQ ID NO: 952
  Description of Artificial Sequence: Synthetic polypeptide

SEQ ID NO: 2941 - protein, 32 aa, Artificial Sequence; identical to SEQ ID NO: 952
  Description of Artificial Sequence: Synthetic polypeptide

SEQ ID NO: 2942 - protein, 32 aa, Artificial Sequence; identical to SEQ ID NO: 952
  Description of Artificial Sequence: Synthetic polypeptide

SEQ ID NO: 2943 - protein, 32 aa, Artificial Sequence; identical to SEQ ID NO: 952
  Description of Artificial Sequence: Synthetic polypeptide

SEQ ID NO: 2944 - protein, 32 aa, Artificial Sequence; identical to SEQ ID NO: 952
  Description of Artificial Sequence: Synthetic polypeptide

SEQ ID NO: 2945 - protein, 13 aa, Artificial Sequence
  Description of Artificial Sequence: Synthetic peptide
DIVGPYSAGLFDY

SEQ ID NO: 2946 - protein, 13 aa, Artificial Sequence
  Description of Artificial Sequence: Synthetic peptide
DIVGPYSAGLFDY

SEQ ID NO: 2947 - protein, 13 aa, Artificial Sequence
  Description of Artificial Sequence: Synthetic peptide
DIRGAYSSGLFDY

SEQ ID NO: 2948 - protein, 13 aa, Artificial Sequence
  Description of Artificial Sequence: Synthetic peptide
DIRGPYSAGLFDY

SEQ ID NO: 2949 - protein, 13 aa, Artificial Sequence
  Description of Artificial Sequence: Synthetic peptide
DIRGAYSSGLFDY

SEQ ID NO: 2950 - protein, 13 aa, Artificial Sequence
  Description of Artificial Sequence: Synthetic peptide
DIVGPYSAGLFDY

SEQ ID NO: 2951 - protein, 13 aa, Artificial Sequence
  Description of Artificial Sequence: Synthetic peptide
DIVGPYSAGLFDY

SEQ ID NO: 2952 - protein, 13 aa, Artificial Sequence
  Description of Artificial Sequence: Synthetic peptide
DIVGPYSAGLFDY

SEQ ID NO: 2953 - protein, 13 aa, Artificial Sequence
  Description of Artificial Sequence: Synthetic peptide
DIVGAYSAGLFDY

SEQ ID NO: 2954 - protein, 13 aa, Artificial Sequence
  Description of Artificial Sequence: Synthetic peptide
DIVGPYSSGLFDY

SEQ ID NO: 2955 - protein, 13 aa, Artificial Sequence
  Description of Artificial Sequence: Synthetic peptide
DIRGAYSSGLFDY

SEQ ID NO: 2956 - protein, 13 aa, Artificial Sequence
  Description of Artificial Sequence: Synthetic peptide
DIRGVFLSGLFDH

SEQ ID NO: 2957 - protein, 13 aa, Artificial Sequence
  Description of Artificial Sequence: Synthetic peptide
DIVGPYSSGLFDY

SEQ ID NO: 2958 - protein, 13 aa, Artificial Sequence
  Description of Artificial Sequence: Synthetic peptide
DIRGAYSSGLFDY

SEQ ID NO: 2959 - protein, 13 aa, Artificial Sequence
  Description of Artificial Sequence: Synthetic peptide
DIVGAYSAGLFDY

SEQ ID NO: 2960 - protein, 13 aa, Artificial Sequence
  Description of Artificial Sequence: Synthetic peptide
DIVGPYSAGLFDY

SEQ ID NO: 2961 - protein, 13 aa, Artificial Sequence
  Description of Artificial Sequence: Synthetic peptide
DIRGPYSAGLFDY

SEQ ID NO: 2962 - protein, 13 aa, Artificial Sequence
  Description of Artificial Sequence: Synthetic peptide
DIVGPYSAGLFDY

SEQ ID NO: 2963 - protein, 13 aa, Artificial Sequence
  Description of Artificial Sequence: Synthetic peptide
DIRGAYSSGLFDY

SEQ ID NO: 2964 - protein, 13 aa, Artificial Sequence
  Description of Artificial Sequence: Synthetic peptide
DIVGAYSAGLFDY

SEQ ID NO: 2965 - protein, 13 aa, Artificial Sequence
  Description of Artificial Sequence: Synthetic peptide
DIVGPYSAGLFDY

SEQ ID NO: 2966 - protein, 13 aa, Artificial Sequence
  Description of Artificial Sequence: Synthetic peptide
DIVGPYSAGLFDY

SEQ ID NO: 2967 - protein, 11 aa, Artificial Sequence
  Description of Artificial Sequence: Synthetic peptide
WGRGTLVTVSS

SEQ ID NO: 2968 - protein, 11 aa, Artificial Sequence
  Description of Artificial Sequence: Synthetic peptide
WGRGTLVTVSS

SEQ ID NO: 2969 - protein, 11 aa, Artificial Sequence
  Description of Artificial Sequence: Synthetic peptide
WGRGTLVTVSS

SEQ ID NO: 2970 - protein, 11 aa, Artificial Sequence
  Description of Artificial Sequence: Synthetic peptide
WGRGTLVTVSS

SEQ ID NO: 2971 - protein, 11 aa, Artificial Sequence
  Description of Artificial Sequence: Synthetic peptide
WGRGTLVTVSS

SEQ ID NO: 2972 - protein, 11 aa, Artificial Sequence
  Description of Artificial Sequence: Synthetic peptide
WGRGTLVTVSS

SEQ ID NO: 2973 - protein, 11 aa, Artificial Sequence
  Description of Artificial Sequence: Synthetic peptide
WGRGTLVTVSS

SEQ ID NO: 2974 - protein, 11 aa, Artificial Sequence
  Description of Artificial Sequence: Synthetic peptide
WGRGTLVTVSS

SEQ ID NO: 2975 - protein, 11 aa, Artificial Sequence
  Description of Artificial Sequence: Synthetic peptide
WGRGTLVTVSS

SEQ ID NO: 2976 - protein, 11 aa, Artificial Sequence
  Description of Artificial Sequence: Synthetic peptide
WGRGTLVTVSS

SEQ ID NO: 2977 - protein, 11 aa, Artificial Sequence
  Description of Artificial Sequence: Synthetic peptide
WGRGTLVTVSS

SEQ ID NO: 2978 - protein, 11 aa, Artificial Sequence
  Description of Artificial Sequence: Synthetic peptide
WGRGTLVTVSS

SEQ ID NO: 2979 - protein, 11 aa, Artificial Sequence
  Description of Artificial Sequence: Synthetic peptide
WGRGTLVTVSS

SEQ ID NO: 2980 - protein, 11 aa, Artificial Sequence
  Description of Artificial Sequence: Synthetic peptide
WGRGTLVTVSS

SEQ ID NO: 2981 - protein, 11 aa, Artificial Sequence
  Description of Artificial Sequence: Synthetic peptide
WGRGTLVTVSS

SEQ ID NO: 2982 - protein, 11 aa, Artificial Sequence
  Description of Artificial Sequence: Synthetic peptide
WGRGTLVTVSS

SEQ ID NO: 2983 - protein, 11 aa, Artificial Sequence
  Description of Artificial Sequence: Synthetic peptide
WGRGTLVTVSS

SEQ ID NO: 2984 - protein, 11 aa, Artificial Sequence
  Description of Artificial Sequence: Synthetic peptide
WGRGTLVTVSS

SEQ ID NO: 2985 - protein, 11 aa, Artificial Sequence
  Description of Artificial Sequence: Synthetic peptide
WGRGTLVTVSS

SEQ ID NO: 2986 - protein, 11 aa, Artificial Sequence
  Description of Artificial Sequence: Synthetic peptide
WGRGTLVTVSS

SEQ ID NO: 2987 - protein, 11 aa, Artificial Sequence
  Description of Artificial Sequence: Synthetic peptide
WGRGTLVTVSS

SEQ ID NO: 2988 - protein, 11 aa, Artificial Sequence
  Description of Artificial Sequence: Synthetic peptide
WGRGTLVTVSS

SEQ ID NO: 2989 - protein, 17 aa, Artificial Sequence
  Description of Artificial Sequence: Synthetic peptide
ASTKGPSVFPLAPSSKS

SEQ ID NO: 2990 - protein, 17 aa, Artificial Sequence
  Description of Artificial Sequence: Synthetic peptide
ASTKGPSVFPLAPSSKS

SEQ ID NO: 2991 - protein, 17 aa, Artificial Sequence
  Description of Artificial Sequence: Synthetic peptide
ASTKGPSVFPLAPSSKS

SEQ ID NO: 2992 - protein, 17 aa, Artificial Sequence
  Description of Artificial Sequence: Synthetic peptide
ASTKGPSVFPLAPSSKS

SEQ ID NO: 2993 - protein, 17 aa, Artificial Sequence
  Description of Artificial Sequence: Synthetic peptide
ASTKGPSVFPLAPSSKS

SEQ ID NO: 2994 - protein, 17 aa, Artificial Sequence
  Description of Artificial Sequence: Synthetic peptide
ASTKGPSVFPLAPSSKS

SEQ ID NO: 2995 - protein, 17 aa, Artificial Sequence
  Description of Artificial Sequence: Synthetic peptide
ASTKGPSVFPLAPSSKS

SEQ ID NO: 2996 - protein, 17 aa, Artificial Sequence
  Description of Artificial Sequence: Synthetic peptide
ASTKGPSVFPLAPSSKS

SEQ ID NO: 2997 - protein, 17 aa, Artificial Sequence
  Description of Artificial Sequence: Synthetic peptide
ASTKGPSVFPLAPSSKS

SEQ ID NO: 2998 - protein, 17 aa, Artificial Sequence
  Description of Artificial Sequence: Synthetic peptide
ASTKGPSVFPLAPSSKS

SEQ ID NO: 2999 - protein, 17 aa, Artificial Sequence
  Description of Artificial Sequence: Synthetic peptide
ASTKGPSVFPLAPSSKS

SEQ ID NO: 3000 - protein, 17 aa, Artificial Sequence
  Description of Artificial Sequence: Synthetic peptide
ASTKGPSVFPLAPSSKS

SEQ ID NO: 3001 - protein, 17 aa, Artificial Sequence
  Description of Artificial Sequence: Synthetic peptide
ASTKGPSVFPLAPSLQV

SEQ ID NO: 3002 - protein, 17 aa, Artificial Sequence
  Description of Artificial Sequence: Synthetic peptide
ASTKGPSVFPLAPSSKS

SEQ ID NO: 3003 - protein, 17 aa, Artificial Sequence
  Description of Artificial Sequence: Synthetic peptide
ASTKGPSVFPLAPSSKS

SEQ ID NO: 3004 - protein, 17 aa, Artificial Sequence
  Description of Artificial Sequence: Synthetic peptide
ASTKGPSVFPLAPSSKS

SEQ ID NO: 3005 - protein, 17 aa, Artificial Sequence
  Description of Artificial Sequence: Synthetic peptide
ASTKGPSVFPLAPSSKS

SEQ ID NO: 3006 - protein, 17 aa, Artificial Sequence
  Description of Artificial Sequence: Synthetic peptide
ASTKGPSVFPLAPSSKS

SEQ ID NO: 3007 - protein, 17 aa, Artificial Sequence
  Description of Artificial Sequence: Synthetic peptide
ASTKGPSVFPLAPSSKS

SEQ ID NO: 3008 - protein, 17 aa, Artificial Sequence
  Description of Artificial Sequence: Synthetic peptide
ASTKGPSVFPLAPSSKS

SEQ ID NO: 3009 - protein, 17 aa, Artificial Sequence
  Description of Artificial Sequence: Synthetic peptide
ASTKGPSVFPLAPSSKS

SEQ ID NO: 3010 - protein, 17 aa, Artificial Sequence
  Description of Artificial Sequence: Synthetic peptide
ASTKGPSVFPLAPSSKS

SEQ ID NO: 3011 - protein, 103 aa, Artificial Sequence
  Description of Artificial Sequence: Synthetic polypeptide
DIQMTQSPSSLSASVGDRVTITCRASQSIYTYLNWYQQKPGKAPKLLIYAASSLQSGVPSRFSGSGSGTDFTLTISSLQPEDFATYYCQQAGIFGQGTKLEIK

SEQ ID NO: 3012 - protein, 103 aa, Artificial Sequence; identical to SEQ ID NO: 3011
  Description of Artificial Sequence: Synthetic polypeptide

SEQ ID NO: 3013 - protein, 103 aa, Artificial Sequence; identical to SEQ ID NO: 3011
  Description of Artificial Sequence: Synthetic polypeptide

SEQ ID NO: 3014 - protein, 103 aa, Artificial Sequence; identical to SEQ ID NO: 3011
  Description of Artificial Sequence: Synthetic polypeptide

SEQ ID NO: 3015 - protein, 103 aa, Artificial Sequence; identical to SEQ ID NO: 3011
  Description of Artificial Sequence: Synthetic polypeptide

SEQ ID NO: 3016 - protein, 103 aa, Artificial Sequence; identical to SEQ ID NO: 3011
  Description of Artificial Sequence: Synthetic polypeptide

SEQ ID NO: 3017 - protein, 103 aa, Artificial Sequence
  Description of Artificial Sequence: Synthetic polypeptide
DIQMTQSPSSLSASVGDRVTITCRANQSIYTYLNWYQQKPGKAPKLLIYAASSLQSGVPSRFSGSGSGTDFTLTISSLQPEDFATYYCQQAGIFGQGTKLEIK

SEQ ID NO: 3018 - protein, 103 aa, Artificial Sequence; identical to SEQ ID NO: 3011
  Description of Artificial Sequence: Synthetic polypeptide

SEQ ID NO: 3019 - protein, 103 aa, Artificial Sequence; identical to SEQ ID NO: 3011
  Description of Artificial Sequence: Synthetic polypeptide

SEQ ID NO: 3020 - protein, 103 aa, Artificial Sequence; identical to SEQ ID NO: 3011
  Description of Artificial Sequence: Synthetic polypeptide

SEQ ID NO: 3021 - protein, 103 aa, Artificial Sequence; identical to SEQ ID NO: 3017
  Description of Artificial Sequence: Synthetic polypeptide

SEQ ID NO: 3022 - protein, 103 aa, Artificial Sequence; identical to SEQ ID NO: 3017
  Description of Artificial Sequence: Synthetic polypeptide

SEQ ID NO: 3023 - protein, 103 aa, Artificial Sequence; identical to SEQ ID NO: 3017
  Description of Artificial Sequence: Synthetic polypeptide

SEQ ID NO: 3024 - protein, 103 aa, Artificial Sequence; identical to SEQ ID NO: 3017
  Description of Artificial Sequence: Synthetic polypeptide

SEQ ID NO: 3025 - protein, 103 aa, Artificial Sequence; identical to SEQ ID NO: 3017
  Description of Artificial Sequence: Synthetic polypeptide

SEQ ID NO: 3026 - protein, 103 aa, Artificial Sequence; identical to SEQ ID NO: 3017
  Description of Artificial Sequence: Synthetic polypeptide

SEQ ID NO: 3027 - protein, 103 aa, Artificial Sequence; identical to SEQ ID NO: 3017
  Description of Artificial Sequence: Synthetic polypeptide

SEQ ID NO: 3028 - protein, 103 aa, Artificial Sequence; identical to SEQ ID NO: 3017
  Description of Artificial Sequence: Synthetic polypeptide

SEQ ID NO: 3029 - protein, 103 aa, Artificial Sequence; identical to SEQ ID NO: 3017
  Description of Artificial Sequence: Synthetic polypeptide

SEQ ID NO: 3030 - protein, 103 aa, Artificial Sequence; identical to SEQ ID NO: 3017
  Description of Artificial Sequence: Synthetic polypeptide

SEQ ID NO: 3031 - protein, 103 aa, Artificial Sequence; identical to SEQ ID NO: 3017
  Description of Artificial Sequence: Synthetic polypeptide

SEQ ID NO: 3032 - protein, 103 aa, Artificial Sequence; identical to SEQ ID NO: 3017
  Description of Artificial Sequence: Synthetic polypeptide

SEQ ID NO: 3033 - protein, 122 aa, Artificial Sequence
  Description of Artificial Sequence: Synthetic polypeptide
EVQLLESGGGLVQPGGSLRLSCAASGFTFSDYWMHWVRQAPGKGLEWVSGISPSGGYTHYADSVKGRFTISRDNSKNTLYLQMNSLRAEDTAVYYCARDIVGPYSAGLFDYWGRGTLVTVSS

SEQ ID NO: 3034 - protein, 122 aa, Artificial Sequence
  Description of Artificial Sequence: Synthetic polypeptide
EVQLLESGGGLVQPGGSLRLSCAASGFTFSWYWMHWVRQAPGKGLEWVSGISPSGGMTHYADSVKGRFTISRDNSKNTLYLQMNSLRAEDTAVYYCARDIVGPYSAGLFDYWGRGTLVTVSS

SEQ ID NO: 3035 - protein, 122 aa, Artificial Sequence
  Description of Artificial Sequence: Synthetic polypeptide
EVQLLESGGGLVQPGGSLRLSCAASGFTFSDYWMHWVRQAPGKGLEWVSGISPSGGYTHYADSVKGRFTISRDNSKNTLYLQMNSLRAEDTAVYYCARDIRGAYSSGLFDYWGRGTLVTVSS

SEQ ID NO: 3036 - protein, 122 aa, Artificial Sequence
  Description of Artificial Sequence: Synthetic polypeptide
EVQLLESGGGLVQPGGSLRLSCAASGFTFSWYWMHWVRQAPGKGLEWVSGISPSGGMTMYADSVKGRFTISRDNSKNTLYLQMNSLRAEDTAVYYCARDIRGPYSAGLFDYWGRGTLVTVSS

SEQ ID NO: 3037 - protein, 122 aa, Artificial Sequence
  Description of Artificial Sequence: Synthetic polypeptide
EVQLLESGGGLVQPGGSLRLSCAASGFTFSWYWMHWVRQAPGKGLEWVSGISPSGGMTMYADSVKGRFTISRDNSKNTLYLQMNSLRAEDTAVYYCARDIRGAYSSGLFDYWGRGTLVTVSS

SEQ ID NO: 3038 - protein, 122 aa, Artificial Sequence
  Description of Artificial Sequence: Synthetic polypeptide
EVQLLESGGGLVQPGGSLRLSCAASGFTFSWYWMHWVRQAPGKGLEWVSGISPSGGYTMYADSVKGRFTISRDNSKNTLYLQMNSLRAEDTAVYYCARDIVGPYSAGLFDYWGRGTLVTVSS

SEQ ID NO: 3039 - protein, 122 aa, Artificial Sequence; identical to SEQ ID NO: 1062
  Description of Artificial Sequence: Synthetic polypeptide

SEQ ID NO: 3040 - protein, 122 aa, Artificial Sequence
  Description of Artificial Sequence: Synthetic polypeptide
EVQLLESGGGLVQPGGSLRLSCAASGFTFSDYWMHWVRQAPGKGLEWVSGISPSGGMTMYADSVKGRFTISRDNSKNTLYLQMNSLRAEDTAVYYCARDIVGPYSAGLFDYWGRGTLVTVSS

SEQ ID NO: 3041 - protein, 122 aa, Artificial Sequence
  Description of Artificial Sequence: Synthetic polypeptide
EVQLLESGGGLVQPGGSLRLSCAASGFTFSWYWMHWVRQAPGKGLEWVSGISPSGGMTMYADSVKGRFTISRDNSKNTLYLQMNSLRAEDTAVYYCARDIVGAYSAGLFDYWGRGTLVTVSS

SEQ ID NO: 3042 - protein, 122 aa, Artificial Sequence
  Description of Artificial Sequence: Synthetic polypeptide
EVQLLESGGGLVQPGGSLRLSCAASGFTFSWYWMHWVRQAPGKGLEWVSGISPSGGMTMYADSVKGRFTISRDNSKNTLYLQMNSLRAEDTAVYYCARDIVGPYSSGLFDYWGRGTLVTVSS

SEQ ID NO: 3043 - protein, 122 aa, Artificial Sequence; identical to SEQ ID NO: 670
  Description of Artificial Sequence: Synthetic polypeptide

SEQ ID NO: 3044 - protein, 122 aa, Artificial Sequence; identical to SEQ ID NO: 1067
  Description of Artificial Sequence: Synthetic polypeptide

SEQ ID NO: 3045 - protein, 122 aa, Artificial Sequence; identical to SEQ ID NO: 3042
  Description of Artificial Sequence: Synthetic polypeptide

SEQ ID NO: 3046 - protein, 122 aa, Artificial Sequence; identical to SEQ ID NO: 3035
  Description of Artificial Sequence: Synthetic polypeptide

SEQ ID NO: 3047 - protein, 122 aa, Artificial Sequence; identical to SEQ ID NO: 3041
  Description of Artificial Sequence: Synthetic polypeptide

SEQ ID NO: 3048 - protein, 122 aa, Artificial Sequence; identical to SEQ ID NO: 3033
  Description of Artificial Sequence: Synthetic polypeptide

SEQ ID NO: 3049 - protein, 122 aa, Artificial Sequence; identical to SEQ ID NO: 3036
  Description of Artificial Sequence: Synthetic polypeptide

SEQ ID NO: 3050 - protein, 122 aa, Artificial Sequence; identical to SEQ ID NO: 1062
  Description of Artificial Sequence: Synthetic polypeptide

SEQ ID NO: 3051 - protein, 122 aa, Artificial Sequence; identical to SEQ ID NO: 3037
  Description of Artificial Sequence: Synthetic polypeptide

SEQ ID NO: 3052 - protein, 122 aa, Artificial Sequence; identical to SEQ ID NO: 3041
  Description of Artificial Sequence: Synthetic polypeptide

SEQ ID NO: 3053 - protein, 122 aa, Artificial Sequence; identical to SEQ ID NO: 3040
  Description of Artificial Sequence: Synthetic polypeptide

SEQ ID NO: 3054 - protein, 122 aa, Artificial Sequence; identical to SEQ ID NO: 3038
  Description of Artificial Sequence: Synthetic polypeptide

SEQ ID NO: 3055 - protein, 4 aa, Artificial Sequence
  Description of Artificial Sequence: Synthetic peptide
GVHS

SEQ ID NO: 3056 - protein, 4 aa, Artificial Sequence
  Description of Artificial Sequence: Synthetic peptide
GVHS

SEQ ID NO: 3057 - protein, 4 aa, Artificial Sequence
  Description of Artificial Sequence: Synthetic peptide
GVHS

SEQ ID NO: 3058 - protein, 4 aa, Artificial Sequence
  Description of Artificial Sequence: Synthetic peptide
GVHS

SEQ ID NO: 3059 - protein, 4 aa, Artificial Sequence
  Description of Artificial Sequence: Synthetic peptide
GVHS

SEQ ID NO: 3060 - protein, 4 aa, Artificial Sequence
  Description of Artificial Sequence: Synthetic peptide
GVHS

SEQ ID NO: 3061 - protein, 4 aa, Artificial Sequence
  Description of Artificial Sequence: Synthetic peptide
GVHS

SEQ ID NO: 3062 - protein, 4 aa, Artificial Sequence
  Description of Artificial Sequence: Synthetic peptide
GVHS

SEQ ID NO: 3063 - protein, 4 aa, Artificial Sequence
  Description of Artificial Sequence: Synthetic peptide
GVHS

SEQ ID NO: 3064 - protein, 4 aa, Artificial Sequence
  Description of Artificial Sequence: Synthetic peptide
GVHS

SEQ ID NO: 3065 - protein, 4 aa, Artificial Sequence
  Description of Artificial Sequence: Synthetic peptide
GVHS

SEQ ID NO: 3066 - protein, 4 aa, Artificial Sequence
  Description of Artificial Sequence: Synthetic peptide
GVHS

SEQ ID NO: 3067 - protein, 4 aa, Artificial Sequence
  Description of Artificial Sequence: Synthetic peptide
GVHS

SEQ ID NO: 3068 - protein, 4 aa, Artificial Sequence
  Description of Artificial Sequence: Synthetic peptide
GVHS

SEQ ID NO: 3069 - protein, 23 aa, Artificial Sequence
  Description of Artificial Sequence: Synthetic peptide
DIQMTQSPSSLSASVGDRVTITC

SEQ ID NO: 3070 - protein, 23 aa, Artificial Sequence
  Description of Artificial Sequence: Synthetic peptide
DIQMTQSPSSLSASVGDRVTITC

SEQ ID NO: 3071 - protein, 23 aa, Artificial Sequence
  Description of Artificial Sequence: Synthetic peptide
DIQMTQSPSSLSASVGDRVTITC

SEQ ID NO: 3072 - protein, 23 aa, Artificial Sequence
  Description of Artificial Sequence: Synthetic peptide
DIQMTQSPSSLSASVGDRVTITC

SEQ ID NO: 3073 - protein, 23 aa, Artificial Sequence
  Description of Artificial Sequence: Synthetic peptide
DIQMTQSPSSLSASVGDRVTITC

SEQ ID NO: 3074 - protein, 23 aa, Artificial Sequence
  Description of Artificial Sequence: Synthetic peptide
DIQMTQSPSSLSASVGDRVTITC

SEQ ID NO: 3075 - protein, 23 aa, Artificial Sequence
  Description of Artificial Sequence: Synthetic peptide
DIQMTQSPSSLSASVGDRVTITC

SEQ ID NO: 3076 - protein, 23 aa, Artificial Sequence
  Description of Artificial Sequence: Synthetic peptide
DIQMTQSPSSLSASVGDRVTITC

SEQ ID NO: 3077 - protein, 23 aa, Artificial Sequence
  Description of Artificial Sequence: Synthetic peptide
DIQMTQSPSSLSASVGDRVTITC

SEQ ID NO: 3078 - protein, 23 aa, Artificial Sequence
  Description of Artificial Sequence: Synthetic peptide
DIQMTQSPSSLSASVGDRVTITC

SEQ ID NO: 3079 - protein, 23 aa, Artificial Sequence
  Description of Artificial Sequence: Synthetic peptide
DIQMTQSPSSLSASVGDRVTITC

SEQ ID NO: 3080 - protein, 23 aa, Artificial Sequence
  Description of Artificial Sequence: Synthetic peptide
DIQMTQSPSSLSASVGDRVTITC

SEQ ID NO: 3081 - protein, 23 aa, Artificial Sequence
  Description of Artificial Sequence: Synthetic peptide
DIQMTQSPSSLSASVGDRVTITC

SEQ ID NO: 3082 - protein, 23 aa, Artificial Sequence
  Description of Artificial Sequence: Synthetic peptide
DIQMTQSPSSLSASVGDRVTITC

SEQ ID NO: 3083 - protein, 11 aa, Artificial Sequence
  Description of Artificial Sequence: Synthetic peptide
RASQSIYTYLN

SEQ ID NO: 3084 - protein, 11 aa, Artificial Sequence
  Description of Artificial Sequence: Synthetic peptide
RASQSIYTYLN

SEQ ID NO: 3085 - protein, 11 aa, Artificial Sequence
  Description of Artificial Sequence: Synthetic peptide
RASQSIYTYLN

SEQ ID NO: 3086 - protein, 11 aa, Artificial Sequence
  Description of Artificial Sequence: Synthetic peptide
RASQSIYTYLN

SEQ ID NO: 3087 - protein, 11 aa, Artificial Sequence
  Description of Artificial Sequence: Synthetic peptide
RASQSIYTYLN

SEQ ID NO: 3088 - protein, 11 aa, Artificial Sequence
  Description of Artificial Sequence: Synthetic peptide
RASQSIYTYLN

SEQ ID NO: 3089 - protein, 11 aa, Artificial Sequence
  Description of Artificial Sequence: Synthetic peptide
RASQSIYTYLN

SEQ ID NO: 3090 - protein, 11 aa, Artificial Sequence
  Description of Artificial Sequence: Synthetic peptide
RASQSIYTYLN

SEQ ID NO: 3091 - protein, 11 aa, Artificial Sequence
  Description of Artificial Sequence: Synthetic peptide
RASQSIYTYLN

SEQ ID NO: 3092 - protein, 11 aa, Artificial Sequence
  Description of Artificial Sequence: Synthetic peptide
RASQSIYTYLN

SEQ ID NO: 3093 - protein, 11 aa, Artificial Sequence
  Description of Artificial Sequence: Synthetic peptide
RASQSIYTYLN

SEQ ID NO: 3094 - protein, 11 aa, Artificial Sequence
  Description of Artificial Sequence: Synthetic peptide
RASQSIYTYLN

SEQ ID NO: 3095 - protein, 11 aa, Artificial Sequence
  Description of Artificial Sequence: Synthetic peptide
RASQSIYTYLN

SEQ ID NO: 3096 - protein, 11 aa, Artificial Sequence
  Description of Artificial Sequence: Synthetic peptide
RASQSIYTYLN

SEQ ID NO: 3097 - protein, 15 aa, Artificial Sequence
  Description of Artificial Sequence: Synthetic peptide
WYQQKPGKAPKLLIY

SEQ ID NO: 3098 - protein, 15 aa, Artificial Sequence
  Description of Artificial Sequence: Synthetic peptide
WYQQKPGKAPKLLIY

SEQ ID NO: 3099 - protein, 15 aa, Artificial Sequence
  Description of Artificial Sequence: Synthetic peptide
WYQQKPGKAPKLLIY

SEQ ID NO: 3100 - protein, 15 aa, Artificial Sequence
  Description of Artificial Sequence: Synthetic peptide
WYQQKPGKAPKLLIY

SEQ ID NO: 3101 - protein, 15 aa, Artificial Sequence
  Description of Artificial Sequence: Synthetic peptide
WYQQKPGKAPKLLIY

SEQ ID NO: 3102 - protein, 15 aa, Artificial Sequence
  Description of Artificial Sequence: Synthetic peptide
WYQQKPGKAPKLLIY

SEQ ID NO: 3103 - protein, 15 aa, Artificial Sequence
  Description of Artificial Sequence: Synthetic peptide
WYQQKPGKAPKLLIY

SEQ ID NO: 3104 - protein, 15 aa, Artificial Sequence
  Description of Artificial Sequence: Synthetic peptide
WYQQKPGKAPKLLIY

SEQ ID NO: 3105 - protein, 15 aa, Artificial Sequence
  Description of Artificial Sequence: Synthetic peptide
WYQQKPGKAPKLLIY

SEQ ID NO: 3106 - protein, 15 aa, Artificial Sequence
  Description of Artificial Sequence: Synthetic peptide
WYQQKPGKAPKLLIY

SEQ ID NO: 3107 - protein, 15 aa, Artificial Sequence
  Description of Artificial Sequence: Synthetic peptide
WYQQKPGKAPKLLIY

SEQ ID NO: 3108 - protein, 15 aa, Artificial Sequence
  Description of Artificial Sequence: Synthetic peptide
WYQQKPGKAPKLLIY

SEQ ID NO: 3109 - protein, 15 aa, Artificial Sequence
  Description of Artificial Sequence: Synthetic peptide
WYQQKPGKAPKLLIY

SEQ ID NO: 3110 - protein, 15 aa, Artificial Sequence
  Description of Artificial Sequence: Synthetic peptide
WYQQKPGKAPKLLIY

SEQ ID NO: 3111 - protein, 7 aa, Artificial Sequence
  Description of Artificial Sequence: Synthetic peptide
AASSLQS

SEQ ID NO: 3112 - protein, 7 aa, Artificial Sequence
  Description of Artificial Sequence: Synthetic peptide
AASSLQS

SEQ ID NO: 3113 - protein, 7 aa, Artificial Sequence
  Description of Artificial Sequence: Synthetic peptide
AASSLQS

SEQ ID NO: 3114 - protein, 7 aa, Artificial Sequence
  Description of Artificial Sequence: Synthetic peptide
AASSLQS

SEQ ID NO: 3115 - protein, 7 aa, Artificial Sequence
  Description of Artificial Sequence: Synthetic peptide
AASSLQS

SEQ ID NO: 3116 - protein, 7 aa, Artificial Sequence
  Description of Artificial Sequence: Synthetic peptide
AASSLQS

SEQ ID NO: 3117 - protein, 7 aa, Artificial Sequence
  Description of Artificial Sequence: Synthetic peptide
AASSLQS

SEQ ID NO: 3118 - protein, 7 aa, Artificial Sequence
  Description of Artificial Sequence: Synthetic peptide
AASSLQS

SEQ ID NO: 3119 - protein, 7 aa, Artificial Sequence
  Description of Artificial Sequence: Synthetic peptide
AASSLQS

SEQ ID NO: 3120 - protein, 7 aa, Artificial Sequence
  Description of Artificial Sequence: Synthetic peptide
AASSLQS

SEQ ID NO: 3121 - protein, 7 aa, Artificial Sequence
  Description of Artificial Sequence: Synthetic peptide
AASSLQS

SEQ ID NO: 3122 - protein, 7 aa, Artificial Sequence
  Description of Artificial Sequence: Synthetic peptide
AASSLQS

SEQ ID NO: 3123 - protein, 7 aa, Artificial Sequence
  Description of Artificial Sequence: Synthetic peptide
AASSLQS

SEQ ID NO: 3124 - protein, 7 aa, Artificial Sequence
  Description of Artificial Sequence: Synthetic peptide
AASSLQS

SEQ ID NO: 3125 - protein, 32 aa, Artificial Sequence; identical to SEQ ID NO: 186
  Description of Artificial Sequence: Synthetic polypeptide

SEQ ID NO: 3126 - protein, 32 aa, Artificial Sequence; identical to SEQ ID NO: 186
  Description of Artificial Sequence: Synthetic polypeptide

SEQ ID NO: 3127 - protein, 32 aa, Artificial Sequence; identical to SEQ ID NO: 186
  Description of Artificial Sequence: Synthetic polypeptide

SEQ ID NO: 3128 - protein, 32 aa, Artificial Sequence; identical to SEQ ID NO: 186
  Description of Artificial Sequence: Synthetic polypeptide

SEQ ID NO: 3129 - protein, 32 aa, Artificial Sequence; identical to SEQ ID NO: 186
  Description of Artificial Sequence: Synthetic polypeptide

SEQ ID NO: 3130 - protein, 32 aa, Artificial Sequence; identical to SEQ ID NO: 186
  Description of Artificial Sequence: Synthetic polypeptide

SEQ ID NO: 3131 - protein, 32 aa, Artificial Sequence; identical to SEQ ID NO: 186
  Description of Artificial Sequence: Synthetic polypeptide

SEQ ID NO: 3132 - protein, 32 aa, Artificial Sequence; identical to SEQ ID NO: 186
  Description of Artificial Sequence: Synthetic polypeptide

SEQ ID NO: 3133 - protein, 32 aa, Artificial Sequence; identical to SEQ ID NO: 186
  Description of Artificial Sequence: Synthetic polypeptide

SEQ ID NO: 3134 - protein, 32 aa, Artificial Sequence; identical to SEQ ID NO: 186
  Description of Artificial Sequence: Synthetic polypeptide

SEQ ID NO: 3135 - protein, 32 aa, Artificial Sequence; identical to SEQ ID NO: 186
  Description of Artificial Sequence: Synthetic polypeptide

SEQ ID NO: 3136 - protein, 32 aa, Artificial Sequence; identical to SEQ ID NO: 186
  Description of Artificial Sequence: Synthetic polypeptide

SEQ ID NO: 3137 - protein, 32 aa, Artificial Sequence; identical to SEQ ID NO: 186
  Description of Artificial Sequence: Synthetic polypeptide

SEQ ID NO: 3138 - protein, 32 aa, Artificial Sequence; identical to SEQ ID NO: 186
  Description of Artificial Sequence: Synthetic polypeptide

SEQ ID NO: 3139 - protein, 5 aa, Artificial Sequence
  Description of Artificial Sequence: Synthetic peptide
QQAGI

SEQ ID NO: 3140 - protein, 5 aa, Artificial Sequence
  Description of Artificial Sequence: Synthetic peptide
QQAGI

SEQ ID NO: 3141 - protein, 5 aa, Artificial Sequence
  Description of Artificial Sequence: Synthetic peptide
QQAGI

SEQ ID NO: 3142 - protein, 5 aa, Artificial Sequence
  Description of Artificial Sequence: Synthetic peptide
QQAGI

SEQ ID NO: 3143 - protein, 5 aa, Artificial Sequence
  Description of Artificial Sequence: Synthetic peptide
QQAGI

SEQ ID NO: 3144 - protein, 5 aa, Artificial Sequence
  Description of Artificial Sequence: Synthetic peptide
QQAGI

SEQ ID NO: 3145 - protein, 5 aa, Artificial Sequence
  Description of Artificial Sequence: Synthetic peptide
QQAGI

SEQ ID NO: 3146 - protein, 5 aa, Artificial Sequence
  Description of Artificial Sequence: Synthetic peptide
QQAGI

SEQ ID NO: 3147 - protein, 5 aa, Artificial Sequence
  Description of Artificial Sequence: Synthetic peptide
QQAGI

SEQ ID NO: 3148 - protein, 5 aa, Artificial Sequence
  Description of Artificial Sequence: Synthetic peptide
QQAGI

SEQ ID NO: 3149 - protein, 5 aa, Artificial Sequence
  Description of Artificial Sequence: Synthetic peptide
QQAGI

SEQ ID NO: 3150 - protein, 5 aa, Artificial Sequence
  Description of Artificial Sequence: Synthetic peptide
QQAGI

SEQ ID NO: 3151 - protein, 5 aa, Artificial Sequence
  Description of Artificial Sequence: Synthetic peptide
QQAGI

SEQ ID NO: 3152 - protein, 5 aa, Artificial Sequence
  Description of Artificial Sequence: Synthetic peptide
QQAGI

SEQ ID NO: 3153 - protein, 10 aa, Artificial Sequence
  Description of Artificial Sequence: Synthetic peptide
FGQGTKLEIK

SEQ ID NO: 3154 - protein, 10 aa, Artificial Sequence
  Description of Artificial Sequence: Synthetic peptide
FGQGTKLEIK

SEQ ID NO: 3155 - protein, 10 aa, Artificial Sequence
  Description of Artificial Sequence: Synthetic peptide
FGQGTKLEIK

SEQ ID NO: 3156 - protein, 10 aa, Artificial Sequence
  Description of Artificial Sequence: Synthetic peptide
FGQGTKLEIK

SEQ ID NO: 3157 - protein, 10 aa, Artificial Sequence
  Description of Artificial Sequence: Synthetic peptide
FGQGTKLEIK

SEQ ID NO: 3158 - protein, 10 aa, Artificial Sequence
  Description of Artificial Sequence: Synthetic peptide
FGQGTKLEIK

SEQ ID NO: 3159 - protein, 10 aa, Artificial Sequence
  Description of Artificial Sequence: Synthetic peptide
FGQGTKLEIK

SEQ ID NO: 3160 - protein, 10 aa, Artificial Sequence
  Description of Artificial Sequence: Synthetic peptide
FGQGTKLEIK

SEQ ID NO: 3161 - protein, 10 aa, Artificial Sequence
  Description of Artificial Sequence: Synthetic peptide
FGQGTKLEIK

SEQ ID NO: 3162 - protein, 10 aa, Artificial Sequence
  Description of Artificial Sequence: Synthetic peptide
FGQGTKLEIK

SEQ ID NO: 3163 - protein, 10 aa, Artificial Sequence
  Description of Artificial Sequence: Synthetic peptide
FGQGTKLEIK

SEQ ID NO: 3164 - protein, 10 aa, Artificial Sequence
  Description of Artificial Sequence: Synthetic peptide
FGQGTKLEIK

SEQ ID NO: 3165 - protein, 10 aa, Artificial Sequence
  Description of Artificial Sequence: Synthetic peptide
FGQGTKLEIK

SEQ ID NO: 3166 - protein, 10 aa, Artificial Sequence
  Description of Artificial Sequence: Synthetic peptide
FGQGTKLEIK

SEQ ID NO: 3167 - protein, 107 aa, Artificial Sequence [sequence omitted]

SEQ ID NO: 3168 - protein, 107 aa, Artificial Sequence [sequence omitted]

SEQ ID NO: 3169 - protein, 107 aa, Artificial Sequence [sequence omitted]

SEQ ID NO: 3170 - protein, 107 aa, Artificial Sequence [sequence omitted]

SEQ ID NO: 3171 - protein, 107 aa, Artificial Sequence [sequence omitted]

SEQ ID NO: 3172 - protein, 107 aa, Artificial Sequence [sequence omitted]

SEQ ID NO: 3173 - protein, 107 aa, Artificial Sequence [sequence omitted]

SEQ ID NO: 3174 - protein, 107 aa, Artificial Sequence [sequence omitted]

SEQ ID NO: 3175 - protein, 107 aa, Artificial Sequence [sequence omitted]

SEQ ID NO: 3176 - protein, 107 aa, Artificial Sequence [sequence omitted]

SEQ ID NO: 3177 - protein, 107 aa, Artificial Sequence [sequence omitted]

SEQ ID NO: 3178 - protein, 107 aa, Artificial Sequence [sequence omitted]

SEQ ID NO: 3179 - protein, 107 aa, Artificial Sequence [sequence omitted]

SEQ ID NO: 3180 - protein, 107 aa, Artificial Sequence [sequence omitted]

SEQ ID NO: 3181 - protein, 19 aa, Artificial Sequence
  Description of Artificial Sequence: Synthetic peptide
MGWSCIILFLVATATGAHS

SEQ ID NO: 3182 - protein, 19 aa, Artificial Sequence
  Description of Artificial Sequence: Synthetic peptide
MGWSCIILFLVATATGAHS

SEQ ID NO: 3183 - protein, 19 aa, Artificial Sequence
  Description of Artificial Sequence: Synthetic peptide
MGWSCIILFLVATATGAHS

SEQ ID NO: 3184 - protein, 19 aa, Artificial Sequence
  Description of Artificial Sequence: Synthetic peptide
MGWSCIILFLVATATGAHS

SEQ ID NO: 3185 - protein, 19 aa, Artificial Sequence
  Description of Artificial Sequence: Synthetic peptide
MGWSCIILFLVATATGAHS

SEQ ID NO: 3186 - protein, 19 aa, Artificial Sequence
  Description of Artificial Sequence: Synthetic peptide
MGWSCIILFLVATATGAHS

SEQ ID NO: 3187 - protein, 19 aa, Artificial Sequence
  Description of Artificial Sequence: Synthetic peptide
MGWSCIILFLVATATGAHS

SEQ ID NO: 3188 - protein, 19 aa, Artificial Sequence
  Description of Artificial Sequence: Synthetic peptide
MGWSCIILFLVATATGAHS

SEQ ID NO: 3189 - protein, 19 aa, Artificial Sequence
  Description of Artificial Sequence: Synthetic peptide
MGWSCIILFLVATATGAHS

SEQ ID NO: 3190 - protein, 19 aa, Artificial Sequence
  Description of Artificial Sequence: Synthetic peptide
MGWSCIILFLVATATGAHS

SEQ ID NO: 3191 - protein, 19 aa, Artificial Sequence
  Description of Artificial Sequence: Synthetic peptide
MGWSCIILFLVATATGAHS

SEQ ID NO: 3192 - protein, 19 aa, Artificial Sequence
  Description of Artificial Sequence: Synthetic peptide
MGWSCIILFLVATATGAHS

SEQ ID NO: 3193 - protein, 19 aa, Artificial Sequence
  Description of Artificial Sequence: Synthetic peptide
MGWSCIILFLVATATGAHS

SEQ ID NO: 3194 - protein, 19 aa, Artificial Sequence
  Description of Artificial Sequence: Synthetic peptide
MGWSCIILFLVATATGAHS

SEQ ID NO: 3195 - protein, 30 aa, Artificial Sequence; identical to SEQ ID NO: 322
  Description of Artificial Sequence: Synthetic polypeptide

SEQ ID NO: 3196 - protein, 30 aa, Artificial Sequence; identical to SEQ ID NO: 322
  Description of Artificial Sequence: Synthetic polypeptide

SEQ ID NO: 3197 - protein, 30 aa, Artificial Sequence; identical to SEQ ID NO: 322
  Description of Artificial Sequence: Synthetic polypeptide

SEQ ID NO: 3198 - protein, 30 aa, Artificial Sequence; identical to SEQ ID NO: 322
  Description of Artificial Sequence: Synthetic polypeptide

SEQ ID NO: 3199 - protein, 30 aa, Artificial Sequence; identical to SEQ ID NO: 322
  Description of Artificial Sequence: Synthetic polypeptide

SEQ ID NO: 3200 - protein, 30 aa, Artificial Sequence; identical to SEQ ID NO: 322
  Description of Artificial Sequence: Synthetic polypeptide

SEQ ID NO: 3201 - protein, 30 aa, Artificial Sequence; identical to SEQ ID NO: 322
  Description of Artificial Sequence: Synthetic polypeptide

SEQ ID NO: 3202 - protein, 30 aa, Artificial Sequence; identical to SEQ ID NO: 322
  Description of Artificial Sequence: Synthetic polypeptide

SEQ ID NO: 3203 - protein, 30 aa, Artificial Sequence; identical to SEQ ID NO: 322
  Description of Artificial Sequence: Synthetic polypeptide

SEQ ID NO: 3204 - protein, 30 aa, Artificial Sequence; identical to SEQ ID NO: 322
  Description of Artificial Sequence: Synthetic polypeptide

SEQ ID NO: 3205 - protein, 30 aa, Artificial Sequence; identical to SEQ ID NO: 322
  Description of Artificial Sequence: Synthetic polypeptide

SEQ ID NO: 3206 - protein, 30 aa, Artificial Sequence; identical to SEQ ID NO: 322
  Description of Artificial Sequence: Synthetic polypeptide

SEQ ID NO: 3207 - protein, 30 aa, Artificial Sequence; identical to SEQ ID NO: 322
  Description of Artificial Sequence: Synthetic polypeptide

SEQ ID NO: 3208 - protein, 30 aa, Artificial Sequence; identical to SEQ ID NO: 322
  Description of Artificial Sequence: Synthetic polypeptide

SEQ ID NO: 3209 - protein, 5 aa, Artificial Sequence
  Description of Artificial Sequence: Synthetic peptide
DYWMH

SEQ ID NO: 3210 - protein, 5 aa, Artificial Sequence
  Description of Artificial Sequence: Synthetic peptide
DYWLH

SEQ ID NO: 3211 - protein, 5 aa, Artificial Sequence
  Description of Artificial Sequence: Synthetic peptide
DYWTH

SEQ ID NO: 3212 - protein, 5 aa, Artificial Sequence
  Description of Artificial Sequence: Synthetic peptide
DYWMH

SEQ ID NO: 3213 - protein, 5 aa, Artificial Sequence
  Description of Artificial Sequence: Synthetic peptide
DYWMH

SEQ ID NO: 3214 - protein, 5 aa, Artificial Sequence
  Description of Artificial Sequence: Synthetic peptide
DYWMH

SEQ ID NO: 3215 - protein, 5 aa, Artificial Sequence
  Description of Artificial Sequence: Synthetic peptide
DYWLH

SEQ ID NO: 3216 - protein, 5 aa, Artificial Sequence
  Description of Artificial Sequence: Synthetic peptide
DYWMH

SEQ ID NO: 3217 - protein, 5 aa, Artificial Sequence
  Description of Artificial Sequence: Synthetic peptide
DYWLH

SEQ ID NO: 3218 - protein, 5 aa, Artificial Sequence
  Description of Artificial Sequence: Synthetic peptide
DYWTH

SEQ ID NO: 3219 - protein, 5 aa, Artificial Sequence
  Description of Artificial Sequence: Synthetic peptide
DYWMH

SEQ ID NO: 3220 - protein, 5 aa, Artificial Sequence
  Description of Artificial Sequence: Synthetic peptide
DYWMH

SEQ ID NO: 3221 - protein, 5 aa, Artificial Sequence
  Description of Artificial Sequence: Synthetic peptide
DYWMH

SEQ ID NO: 3222 - protein, 5 aa, Artificial Sequence
  Description of Artificial Sequence: Synthetic peptide
DYWLH

SEQ ID NO: 3223 - protein, 14 aa, Artificial Sequence
  Description of Artificial Sequence: Synthetic peptide
WVRQAPGKGLEWVS

SEQ ID NO: 3224 - protein, 14 aa, Artificial Sequence
  Description of Artificial Sequence: Synthetic peptide
WVRQAPGKGLEWVS

SEQ ID NO: 3225 - protein, 14 aa, Artificial Sequence
  Description of Artificial Sequence: Synthetic peptide
WVRQAPGKGLEWVS

SEQ ID NO: 3226 - protein, 14 aa, Artificial Sequence
  Description of Artificial Sequence: Synthetic peptide
WVRQAPGKGLEWVS

SEQ ID NO: 3227 - protein, 14 aa, Artificial Sequence
  Description of Artificial Sequence: Synthetic peptide
WVRQAPGKGLEWVS

SEQ ID NO: 3228 - protein, 14 aa, Artificial Sequence
  Description of Artificial Sequence: Synthetic peptide
WVRQAPGKGLEWVS

SEQ ID NO: 3229 - protein, 14 aa, Artificial Sequence
  Description of Artificial Sequence: Synthetic peptide
WVRQAPGKGLEWVS

SEQ ID NO: 3230 - protein, 14 aa, Artificial Sequence
  Description of Artificial Sequence: Synthetic peptide
WVRQAPGKGLEWVS

SEQ ID NO: 3231 - protein, 14 aa, Artificial Sequence
  Description of Artificial Sequence: Synthetic peptide
WVRQAPGKGLEWVS

SEQ ID NO: 3232 - protein, 14 aa, Artificial Sequence
  Description of Artificial Sequence: Synthetic peptide
WVRQAPGKGLEWVS

SEQ ID NO: 3233 - protein, 14 aa, Artificial Sequence
  Description of Artificial Sequence: Synthetic peptide
WVRQAPGKGLEWVS

SEQ ID NO: 3234 - protein, 14 aa, Artificial Sequence
  Description of Artificial Sequence: Synthetic peptide
WVRQAPGKGLEWVS

SEQ ID NO: 3235 - protein, 14 aa, Artificial Sequence
  Description of Artificial Sequence: Synthetic peptide
WVRQAPGKGLEWVS

SEQ ID NO: 3236 - protein, 14 aa, Artificial Sequence
  Description of Artificial Sequence: Synthetic peptide
WVRQAPGKGLEWVS

SEQ ID NO: 3237 - protein, 17 aa, Artificial Sequence
  Description of Artificial Sequence: Synthetic peptide
GISPSGGMTMYADSVKG

SEQ ID NO: 3238 - protein, 17 aa, Artificial Sequence
  Description of Artificial Sequence: Synthetic peptide
GISPSGGMTMYADSVKG

SEQ ID NO: 3239 - protein, 17 aa, Artificial Sequence
  Description of Artificial Sequence: Synthetic peptide
GISPSGGMTMYADSVKG

SEQ ID NO: 3240 - protein, 17 aa, Artificial Sequence
  Description of Artificial Sequence: Synthetic peptide
GISPSGGSTMYADSVKG

SEQ ID NO: 3241 - protein, 17 aa, Artificial Sequence
  Description of Artificial Sequence: Synthetic peptide
GISPSGGMTYYADSVKG

SEQ ID NO: 3242 - protein, 17 aa, Artificial Sequence
  Description of Artificial Sequence: Synthetic peptide
GISPSGGSTYYADSVKG

SEQ ID NO: 3243 - protein, 17 aa, Artificial Sequence
  Description of Artificial Sequence: Synthetic peptide
GISPSGGSTYYADSVKG

SEQ ID NO: 3244 - protein, 17 aa, Artificial Sequence
  Description of Artificial Sequence: Synthetic peptide
GISGSGGMTMYADSVKG

SEQ ID NO: 3245 - protein, 17 aa, Artificial Sequence
  Description of Artificial Sequence: Synthetic peptide
GISGSGGMTMYADSVKG

SEQ ID NO: 3246 - protein, 17 aa, Artificial Sequence
  Description of Artificial Sequence: Synthetic peptide
GISGSGGMTMYADSVKG

SEQ ID NO: 3247 - protein, 17 aa, Artificial Sequence
  Description of Artificial Sequence: Synthetic peptide
GISGSGGSTMYADSVKG

SEQ ID NO: 3248 - protein, 17 aa, Artificial Sequence
  Description of Artificial Sequence: Synthetic peptide
GISGSGGMTYYADSVKG

SEQ ID NO: 3249 - protein, 17 aa, Artificial Sequence
  Description of Artificial Sequence: Synthetic peptide
GISGSGGSTYYADSVKG

SEQ ID NO: 3250 - protein, 17 aa, Artificial Sequence
  Description of Artificial Sequence: Synthetic peptide
GISGSGGSTYYADSVKG

SEQ ID NO: 3251 - protein, 32 aa, Artificial Sequence; identical to SEQ ID NO: 952
  Description of Artificial Sequence: Synthetic polypeptide

SEQ ID NO: 3252 - protein, 32 aa, Artificial Sequence; identical to SEQ ID NO: 952
  Description of Artificial Sequence: Synthetic polypeptide

SEQ ID NO: 3253 - protein, 32 aa, Artificial Sequence; identical to SEQ ID NO: 952
  Description of Artificial Sequence: Synthetic polypeptide

SEQ ID NO: 3254 - protein, 32 aa, Artificial Sequence; identical to SEQ ID NO: 952
  Description of Artificial Sequence: Synthetic polypeptide

SEQ ID NO: 3255 - protein, 32 aa, Artificial Sequence; identical to SEQ ID NO: 952
  Description of Artificial Sequence: Synthetic polypeptide

SEQ ID NO: 3256 - protein, 32 aa, Artificial Sequence; identical to SEQ ID NO: 952
  Description of Artificial Sequence: Synthetic polypeptide

SEQ ID NO: 3257 - protein, 32 aa, Artificial Sequence; identical to SEQ ID NO: 952
  Description of Artificial Sequence: Synthetic polypeptide

SEQ ID NO: 3258 - protein, 32 aa, Artificial Sequence; identical to SEQ ID NO: 952
  Description of Artificial Sequence: Synthetic polypeptide

SEQ ID NO: 3259 - protein, 32 aa, Artificial Sequence; identical to SEQ ID NO: 952
  Description of Artificial Sequence: Synthetic polypeptide

SEQ ID NO: 3260 - protein, 32 aa, Artificial Sequence; identical to SEQ ID NO: 952
  Description of Artificial Sequence: Synthetic polypeptide

SEQ ID NO: 3261 - protein, 32 aa, Artificial Sequence; identical to SEQ ID NO: 952
  Description of Artificial Sequence: Synthetic polypeptide

SEQ ID NO: 3262 - protein, 32 aa, Artificial Sequence; identical to SEQ ID NO: 952
  Description of Artificial Sequence: Synthetic polypeptide

SEQ ID NO: 3263 - protein, 32 aa, Artificial Sequence; identical to SEQ ID NO: 952
  Description of Artificial Sequence: Synthetic polypeptide

SEQ ID NO: 3264 - protein, 32 aa, Artificial Sequence; identical to SEQ ID NO: 952
  Description of Artificial Sequence: Synthetic polypeptide

SEQ ID NO: 3265 - protein, 13 aa, Artificial Sequence
  Description of Artificial Sequence: Synthetic peptide
DIVGPYSAGLFDY

SEQ ID NO: 3266 - protein, 13 aa, Artificial Sequence
  Description of Artificial Sequence: Synthetic peptide
DIVGPYSAGLFDY

SEQ ID NO: 3267 - protein, 13 aa, Artificial Sequence
  Description of Artificial Sequence: Synthetic peptide
DIVGPYSAGLFDY

SEQ ID NO: 3268 - protein, 13 aa, Artificial Sequence
  Description of Artificial Sequence: Synthetic peptide
DIVGPYSAGLFDY

SEQ ID NO: 3269 - protein, 13 aa, Artificial Sequence
  Description of Artificial Sequence: Synthetic peptide
DIVGPYSAGLFDY

SEQ ID NO: 3270 - protein, 13 aa, Artificial Sequence
  Description of Artificial Sequence: Synthetic peptide
DIVGPYSAGLFDY

SEQ ID NO: 3271 - protein, 13 aa, Artificial Sequence
  Description of Artificial Sequence: Synthetic peptide
DIVGPYSAGLFDY

SEQ ID NO: 3272 - protein, 13 aa, Artificial Sequence
  Description of Artificial Sequence: Synthetic peptide
DIVGPYSAGLFDY

SEQ ID NO: 3273 - protein, 13 aa, Artificial Sequence
  Description of Artificial Sequence: Synthetic peptide
DIVGPYSAGLFDY

SEQ ID NO: 3274 - protein, 13 aa, Artificial Sequence
  Description of Artificial Sequence: Synthetic peptide
DIVGPYSAGLFDY

SEQ ID NO: 3275 - protein, 13 aa, Artificial Sequence
  Description of Artificial Sequence: Synthetic peptide
DIVGPYSAGLFDY

SEQ ID NO: 3276 - protein, 13 aa, Artificial Sequence
  Description of Artificial Sequence: Synthetic peptide
DIVGPYSAGLFDY

SEQ ID NO: 3277 - protein, 13 aa, Artificial Sequence
  Description of Artificial Sequence: Synthetic peptide
DIVGPYSAGLFDY

SEQ ID NO: 3278 - protein, 13 aa, Artificial Sequence
  Description of Artificial Sequence: Synthetic peptide
DIVGPYSAGLFDY

SEQ ID NO: 3279 - protein, 11 aa, Artificial Sequence
  Description of Artificial Sequence: Synthetic peptide
WGRGTLVTVSS

SEQ ID NO: 3280 - protein, 11 aa, Artificial Sequence
  Description of Artificial Sequence: Synthetic peptide
WGRGTLVTVSS

SEQ ID NO: 3281 - protein, 11 aa, Artificial Sequence
  Description of Artificial Sequence: Synthetic peptide
WGRGTLVTVSS

SEQ ID NO: 3282 - protein, 11 aa, Artificial Sequence
  Description of Artificial Sequence: Synthetic peptide
WGRGTLVTVSS

SEQ ID NO: 3283 - protein, 11 aa, Artificial Sequence
  Description of Artificial Sequence: Synthetic peptide
WGRGTLVTVSS

SEQ ID NO: 3284 - protein, 11 aa, Artificial Sequence
  Description of Artificial Sequence: Synthetic peptide
WGRGTLVTVSS

SEQ ID NO: 3285 - protein, 11 aa, Artificial Sequence
  Description of Artificial Sequence: Synthetic peptide
WGRGTLVTVSS

SEQ ID NO: 3286 - protein, 11 aa, Artificial Sequence
  Description of Artificial Sequence: Synthetic peptide
WGRGTLVTVSS

SEQ ID NO: 3287 - protein, 11 aa, Artificial Sequence
  Description of Artificial Sequence: Synthetic peptide
WGRGTLVTVSS

SEQ ID NO: 3288 - protein, 11 aa, Artificial Sequence
  Description of Artificial Sequence: Synthetic peptide
WGRGTLVTVSS

SEQ ID NO: 3289 - protein, 11 aa, Artificial Sequence
  Description of Artificial Sequence: Synthetic peptide
WGRGTLVTVSS

SEQ ID NO: 3290 - protein, 11 aa, Artificial Sequence
  Description of Artificial Sequence: Synthetic peptide
WGRGTLVTVSS

SEQ ID NO: 3291 - protein, 11 aa, Artificial Sequence
  Description of Artificial Sequence: Synthetic peptide
WGRGTLVTVSS

SEQ ID NO: 3292 - protein, 11 aa, Artificial Sequence
  Description of Artificial Sequence: Synthetic peptide
WGRGTLVTVSS

SEQ ID NO: 3293 - protein, 17 aa, Artificial Sequence
  Description of Artificial Sequence: Synthetic peptide
ASTKGPSVFPLAPSSKS

SEQ ID NO: 3294 - protein, 17 aa, Artificial Sequence
  Description of Artificial Sequence: Synthetic peptide
ASTKGPSVFPLAPSSKS

SEQ ID NO: 3295 - protein, 17 aa, Artificial Sequence
  Description of Artificial Sequence: Synthetic peptide
ASTKGPSVFPLAPSSKS

SEQ ID NO: 3296 - protein, 17 aa, Artificial Sequence
  Description of Artificial Sequence: Synthetic peptide
ASTKGPSVFPLAPSSKS

SEQ ID NO: 3297 - protein, 17 aa, Artificial Sequence
  Description of Artificial Sequence: Synthetic peptide
ASTKGPSVFPLAPSSKS

SEQ ID NO: 3298 - protein, 17 aa, Artificial Sequence
  Description of Artificial Sequence: Synthetic peptide
ASTKGPSVFPLAPSSKS

SEQ ID NO: 3299 - protein, 17 aa, Artificial Sequence
  Description of Artificial Sequence: Synthetic peptide
ASTKGPSVFPLAPSSKS

SEQ ID NO: 3300 - protein, 17 aa, Artificial Sequence
  Description of Artificial Sequence: Synthetic peptide
ASTKGPSVFPLAPSSKS

SEQ ID NO: 3301 - protein, 17 aa, Artificial Sequence
  Description of Artificial Sequence: Synthetic peptide
ASTKGPSVFPLAPSSKS

SEQ ID NO: 3302 - protein, 17 aa, Artificial Sequence
  Description of Artificial Sequence: Synthetic peptide
ASTKGPSVFPLAPSSKS

SEQ ID NO: 3303 - protein, 17 aa, Artificial Sequence
  Description of Artificial Sequence: Synthetic peptide
ASTKGPSVFPLAPSSKS

SEQ ID NO: 3304 - protein, 17 aa, Artificial Sequence
  Description of Artificial Sequence: Synthetic peptide
ASTKGPSVFPLAPSSKS

SEQ ID NO: 3305 - protein, 17 aa, Artificial Sequence
  Description of Artificial Sequence: Synthetic peptide
ASTKGPSVFPLAPSSKS

SEQ ID NO: 3306 - protein, 17 aa, Artificial Sequence
  Description of Artificial Sequence: Synthetic peptide
ASTKGPSVFPLAPSSKS

SEQ ID NO: 3307 - protein, 103 aa, Artificial Sequence; identical to SEQ ID NO: 3011
  Description of Artificial Sequence: Synthetic polypeptide

SEQ ID NO: 3308 - protein, 103 aa, Artificial Sequence; identical to SEQ ID NO: 3011
  Description of Artificial Sequence: Synthetic polypeptide

SEQ ID NO: 3309 - protein, 103 aa, Artificial Sequence; identical to SEQ ID NO: 3011
  Description of Artificial Sequence: Synthetic polypeptide

SEQ ID NO: 3310 - protein, 103 aa, Artificial Sequence; identical to SEQ ID NO: 3011
  Description of Artificial Sequence: Synthetic polypeptide

SEQ ID NO: 3311 - protein, 103 aa, Artificial Sequence; identical to SEQ ID NO: 3011
  Description of Artificial Sequence: Synthetic polypeptide

SEQ ID NO: 3312 - protein, 103 aa, Artificial Sequence; identical to SEQ ID NO: 3011
  Description of Artificial Sequence: Synthetic polypeptide

SEQ ID NO: 3313 - protein, 103 aa, Artificial Sequence; identical to SEQ ID NO: 3011
  Description of Artificial Sequence: Synthetic polypeptide

SEQ ID NO: 3314 - protein, 103 aa, Artificial Sequence; identical to SEQ ID NO: 3011
  Description of Artificial Sequence: Synthetic polypeptide

SEQ ID NO: 3315 - protein, 103 aa, Artificial Sequence; identical to SEQ ID NO: 3011
  Description of Artificial Sequence: Synthetic polypeptide

SEQ ID NO: 3316 - protein, 103 aa, Artificial Sequence; identical to SEQ ID NO: 3011
  Description of Artificial Sequence: Synthetic polypeptide

SEQ ID NO: 3317 - protein, 103 aa, Artificial Sequence; identical to SEQ ID NO: 3011
  Description of Artificial Sequence: Synthetic polypeptide

SEQ ID NO: 3318 - protein, 103 aa, Artificial Sequence; identical to SEQ ID NO: 3011
  Description of Artificial Sequence: Synthetic polypeptide

SEQ ID NO: 3319 - protein, 103 aa, Artificial Sequence; identical to SEQ ID NO: 3011
  Description of Artificial Sequence: Synthetic polypeptide

SEQ ID NO: 3320 - protein, 103 aa, Artificial Sequence; identical to SEQ ID NO: 3011
  Description of Artificial Sequence: Synthetic polypeptide

SEQ ID NO: 3321 - protein, 122 aa, Artificial Sequence; identical to SEQ ID NO: 3040
  Description of Artificial Sequence: Synthetic polypeptide

SEQ ID NO: 3322 - protein, 122 aa, Artificial Sequence; identical to SEQ ID NO: 3040
  Description of Artificial Sequence: Synthetic polypeptide

SEQ ID NO: 3323 - protein, 122 aa, Artificial Sequence; identical to SEQ ID NO: 3040
  Description of Artificial Sequence: Synthetic polypeptide

SEQ ID NO: 3324 - protein, 122 aa, Artificial Sequence; identical to SEQ ID NO: 3040
  Description of Artificial Sequence: Synthetic polypeptide

SEQ ID NO: 3325 - protein, 122 aa, Artificial Sequence; identical to SEQ ID NO: 3040
  Description of Artificial Sequence: Synthetic polypeptide

SEQ ID NO: 3326 - protein, 122 aa, Artificial Sequence; identical to SEQ ID NO: 3040
  Description of Artificial Sequence: Synthetic polypeptide

SEQ ID NO: 3327 - protein, 122 aa, Artificial Sequence; identical to SEQ ID NO: 3040
  Description of Artificial Sequence: Synthetic polypeptide

SEQ ID NO: 3328 - protein, 122 aa, Artificial Sequence; identical to SEQ ID NO: 3040
  Description of Artificial Sequence: Synthetic polypeptide

SEQ ID NO: 3329 - protein, 122 aa, Artificial Sequence; identical to SEQ ID NO: 3040
  Description of Artificial Sequence: Synthetic polypeptide

SEQ ID NO: 3330 - protein, 122 aa, Artificial Sequence; identical to SEQ ID NO: 3040
  Description of Artificial Sequence: Synthetic polypeptide

SEQ ID NO: 3331 - protein, 122 aa, Artificial Sequence; identical to SEQ ID NO: 3040
  Description of Artificial Sequence: Synthetic polypeptide

SEQ ID NO: 3332 - protein, 122 aa, Artificial Sequence; identical to SEQ ID NO: 3040
  Description of Artificial Sequence: Synthetic polypeptide

SEQ ID NO: 3333 - protein, 122 aa, Artificial Sequence; identical to SEQ ID NO: 3040
  Description of Artificial Sequence: Synthetic polypeptide

SEQ ID NO: 3334 - protein, 122 aa, Artificial Sequence; identical to SEQ ID NO: 3040
  Description of Artificial Sequence: Synthetic polypeptide

SEQ ID NO: 3335 - protein, 5 aa, Artificial Sequence
  Description of Artificial Sequence: Synthetic peptide
DYNMH

SEQ ID NO: 3336 - protein, 5 aa, Artificial Sequence
  Description of Artificial Sequence: Synthetic peptide
WYMMG

SEQ ID NO: 3337 - protein, 5 aa, Artificial Sequence
  Description of Artificial Sequence: Synthetic peptide
PYWMH

SEQ ID NO: 3338 - protein, 5 aa, Artificial Sequence
  Description of Artificial Sequence: Synthetic peptide
PYWMS

SEQ ID NO: 3339 - protein, 5 aa, Artificial Sequence
  Description of Artificial Sequence: Synthetic peptide
WYWMV

SEQ ID NO: 3340 - protein, 5 aa, Artificial Sequence
  Description of Artificial Sequence: Synthetic peptide
YYGMG

SEQ ID NO: 3341 - protein, 5 aa, Artificial Sequence
  Description of Artificial Sequence: Synthetic peptide
WYWMH

SEQ ID NO: 3342 - protein, 5 aa, Artificial Sequence
  Description of Artificial Sequence: Synthetic peptide
WYNMS

SEQ ID NO: 3343 - protein, 5 aa, Artificial Sequence
  Description of Artificial Sequence: Synthetic peptide
YYNMH

SEQ ID NO: 3344 - protein, 5 aa, Artificial Sequence
  Description of Artificial Sequence: Synthetic peptide
EYWMY

SEQ ID NO: 3345 - protein, 5 aa, Artificial Sequence
  Description of Artificial Sequence: Synthetic peptide
PYWMH

SEQ ID NO: 3346 - protein, 5 aa, Artificial Sequence
  Description of Artificial Sequence: Synthetic peptide
LYHMH

SEQ ID NO: 3347 - protein, 5 aa, Artificial Sequence
  Description of Artificial Sequence: Synthetic peptide
PYWMH

SEQ ID NO: 3348 - protein, 5 aa, Artificial Sequence
  Description of Artificial Sequence: Synthetic peptide
WYNMH

SEQ ID NO: 3349 - protein, 5 aa, Artificial Sequence
  Description of Artificial Sequence: Synthetic peptide
WYWMV

SEQ ID NO: 3350 - protein, 5 aa, Artificial Sequence
  Description of Artificial Sequence: Synthetic peptide
DYNMH

SEQ ID NO: 3351 - protein, 5 aa, Artificial Sequence
  Description of Artificial Sequence: Synthetic peptide
WYWMH

SEQ ID NO: 3352 - protein, 5 aa, Artificial Sequence
  Description of Artificial Sequence: Synthetic peptide
EYNMH

SEQ ID NO: 3353 - protein, 5 aa, Artificial Sequence
  Description of Artificial Sequence: Synthetic peptide
WYWMH

SEQ ID NO: 3354 - protein, 5 aa, Artificial Sequence
  Description of Artificial Sequence: Synthetic peptide
WYGMH

SEQ ID NO: 3355 - protein, 5 aa, Artificial Sequence
  Description of Artificial Sequence: Synthetic peptide
YYNMH

SEQ ID NO: 3356 - protein, 5 aa, Artificial Sequence
  Description of Artificial Sequence: Synthetic peptide
EYNMH

SEQ ID NO: 3357 - protein, 17 aa, Artificial Sequence
  Description of Artificial Sequence: Synthetic peptide
YIGPSGGYTHYADSVKG

SEQ ID NO: 3358 - protein, 17 aa, Artificial Sequence
  Description of Artificial Sequence: Synthetic peptide
SISPSGGYTFYADSVKG

SEQ ID NO: 3359 - protein, 17 aa, Artificial Sequence
  Description of Artificial Sequence: Synthetic peptide
GIGPSGGLTFYADSVKG

SEQ ID NO: 3360 - protein, 17 aa, Artificial Sequence
  Description of Artificial Sequence: Synthetic peptide
GISPSGGITFYADSVKG

SEQ ID NO: 3361 - protein, 17 aa, Artificial Sequence
  Description of Artificial Sequence: Synthetic peptide
SIGPSGGDTYYADSVKG

SEQ ID NO: 3362 - protein, 17 aa, Artificial Sequence
  Description of Artificial Sequence: Synthetic peptide
VISSSGGFTFYADSVKG

SEQ ID NO: 3363 - protein, 17 aa, Artificial Sequence
  Description of Artificial Sequence: Synthetic peptide
GIVSSGGTTIYADSVKG

SEQ ID NO: 3364 - protein, 17 aa, Artificial Sequence
  Description of Artificial Sequence: Synthetic peptide
RISPSGGDTGYADSVKG

SEQ ID NO: 3365 - protein, 17 aa, Artificial Sequence
  Description of Artificial Sequence: Synthetic peptide
GIGPSGGGTLYADSVKG

SEQ ID NO: 3366 - protein, 17 aa, Artificial Sequence
  Description of Artificial Sequence: Synthetic peptide
GISPSGGMTFYADSVKG

SEQ ID NO: 3367 - protein, 17 aa, Artificial Sequence
  Description of Artificial Sequence: Synthetic peptide
GIGPSGGPTFYADSIKG

SEQ ID NO: 3368 - protein, 17 aa, Artificial Sequence
  Description of Artificial Sequence: Synthetic peptide
GIGPSGGWTIYADSVKG

SEQ ID NO: 3369 - protein, 17 aa, Artificial Sequence
  Description of Artificial Sequence: Synthetic peptide
GISSSGGDTLYADSVKG

SEQ ID NO: 3370 - protein, 17 aa, Artificial Sequence
  Description of Artificial Sequence: Synthetic peptide
GISPSGGNTSYADSVKG

SEQ ID NO: 3371 - protein, 17 aa, Artificial Sequence
  Description of Artificial Sequence: Synthetic peptide
SIVPSGGFTIYADSVKG

SEQ ID NO: 3372 - protein, 17 aa, Artificial Sequence
  Description of Artificial Sequence: Synthetic peptide
YIGPSGGYTHYADSVKG

SEQ ID NO: 3373 - protein, 17 aa, Artificial Sequence
  Description of Artificial Sequence: Synthetic peptide
GIYSSGGDTIYADSVKG

SEQ ID NO: 3374 - protein, 17 aa, Artificial Sequence
  Description of Artificial Sequence: Synthetic peptide
GIVPSGGLTHYADSVKG

SEQ ID NO: 3375 - protein, 17 aa, Artificial Sequence
  Description of Artificial Sequence: Synthetic peptide
GISPSGGMTMYADSVKG

SEQ ID NO: 3376 - protein, 17 aa, Artificial Sequence
  Description of Artificial Sequence: Synthetic peptide
GIVSSGGETFYADSVKG

SEQ ID NO: 3377 - protein, 17 aa, Artificial Sequence
  Description of Artificial Sequence: Synthetic peptide
GISPSGGTTFYADSVKG

SEQ ID NO: 3378 - protein, 17 aa, Artificial Sequence
  Description of Artificial Sequence: Synthetic peptide
GIVPSGGLTHYADSVKG

SEQ ID NO: 3379 - protein, 13 aa, Artificial Sequence
  Description of Artificial Sequence: Synthetic peptide
DIRGAYSSGLFDY

SEQ ID NO: 3380 - protein, 13 aa, Artificial Sequence
  Description of Artificial Sequence: Synthetic peptide
DIRGAYSSGLFDY

SEQ ID NO: 3381 - protein, 13 aa, Artificial Sequence
  Description of Artificial Sequence: Synthetic peptide
DIRGAYSSGLFDY

SEQ ID NO: 3382 - protein, 13 aa, Artificial Sequence
  Description of Artificial Sequence: Synthetic peptide
DIRGAYSSGLFDY

SEQ ID NO: 3383 - protein, 13 aa, Artificial Sequence
  Description of Artificial Sequence: Synthetic peptide
DIRGAYSSGLFDY

SEQ ID NO: 3384 - protein, 13 aa, Artificial Sequence
  Description of Artificial Sequence: Synthetic peptide
DIRGAYSSGLFDY

SEQ ID NO: 3385 - protein, 13 aa, Artificial Sequence
  Description of Artificial Sequence: Synthetic peptide
DIRGAYSSGLFDY

SEQ ID NO: 3386 - protein, 13 aa, Artificial Sequence
  Description of Artificial Sequence: Synthetic peptide
DIRGAYSSGLFDY

SEQ ID NO: 3387 - protein, 13 aa, Artificial Sequence
  Description of Artificial Sequence: Synthetic peptide
DIRGAYSSGLFDY

SEQ ID NO: 3388 - protein, 13 aa, Artificial Sequence
  Description of Artificial Sequence: Synthetic peptide
DIRGAYSSGLFDY

SEQ ID NO: 3389 - protein, 13 aa, Artificial Sequence
  Description of Artificial Sequence: Synthetic peptide
DIRGAYSSGLFDY

SEQ ID NO: 3390 - protein, 13 aa, Artificial Sequence
  Description of Artificial Sequence: Synthetic peptide
DIRGAYSSGLFDY

SEQ ID NO: 3391 - protein, 13 aa, Artificial Sequence
  Description of Artificial Sequence: Synthetic peptide
DIRGAYSSGLFDY

SEQ ID NO: 3392 - protein, 13 aa, Artificial Sequence
  Description of Artificial Sequence: Synthetic peptide
DIRGAYSSGLFDY

SEQ ID NO: 3393 - protein, 13 aa, Artificial Sequence
  Description of Artificial Sequence: Synthetic peptide
DIRGAYSSGLFDY

SEQ ID NO: 3394 - protein, 13 aa, Artificial Sequence
  Description of Artificial Sequence: Synthetic peptide
DIRGAYASGLFDY

SEQ ID NO: 3395 - protein, 13 aa, Artificial Sequence
  Description of Artificial Sequence: Synthetic peptide
DIRGPHSSGLFDY

SEQ ID NO: 3396 - protein, 13 aa, Artificial Sequence
  Description of Artificial Sequence: Synthetic peptide
DIRGAYSSGLFDY

SEQ ID NO: 3397 - protein, 13 aa, Artificial Sequence
  Description of Artificial Sequence: Synthetic peptide
DIVGPYSAGLFDY

SEQ ID NO: 3398 - protein, 13 aa, Artificial Sequence
  Description of Artificial Sequence: Synthetic peptide
DIRGVFLSGLFDH

SEQ ID NO: 3399 - protein, 13 aa, Artificial Sequence
  Description of Artificial Sequence: Synthetic peptide
DITGAYSAGLFDL

SEQ ID NO: 3400 - protein, 13 aa, Artificial Sequence
  Description of Artificial Sequence: Synthetic peptide
DIRGAYSAGIFDY

SEQ ID NO: 3401 - protein, 7 aa, Artificial Sequence
  Description of Artificial Sequence: Synthetic peptide
  MOD_RES (1)..(1): 7-Methoxycoumarin-4-acetyl-Pro
  MOD_RES (5)..(5): Diaminopropionyl(dinitrophenyl)
PLGLXAR

SEQ ID NO: 3402 - protein, 11 aa, Artificial Sequence
  Description of Artificial Sequence: Synthetic peptide
RANQSIYTYLN

1. An isolated Matrix Metalloproteinase-12 (MMP-12) binding protein, wherein the protein comprises at least one immunoglobulin variable region.

2. The protein of claim 1, wherein the protein binds human MMP-12.

3. The protein of claim 1, wherein the protein inhibits the catalytic activity of MMP-12.

4. The protein of claim 1, wherein the protein comprises an antibody.

5. The protein of claim 1, wherein the protein guides a nano-particle or toxin to a cell expressing MMP-12 on the cell surface.

6-11. (canceled)

12. The protein of claim 1, wherein the protein comprises one or more of the following characteristics:
(a) a human CDR or human framework region;
(b) the HC immunoglobulin variable domain sequence comprises one or more CDRs that are at least 85% identical to a CDR of a HC variable domain described herein;
(c) the LC immunoglobulin variable domain sequence comprises one or more CDRs that are at least 85% identical to a CDR of a LC variable domain described herein;
(d) the LC immunoglobulin variable domain sequence is at least 85% identical to a LC variable domain described herein;
(e) the HC immunoglobulin variable domain sequence is at least 85% identical to a HC variable domain described herein;
(f) the protein binds an epitope bound by a protein described herein, or an epitope that overlaps with such epitope; and
(g) a primate CDR or primate framework region.

13. (canceled)

14. The protein of claim 1, wherein the protein comprises an antibody comprising light and heavy chains of an antibody selected from the group of antibodies consisting of: M0134-A02, M134-A05, M134-A07, M134-A09, M134-A10, M134-A11, M0134-B01, M134-B04, M0134-B08, M0134-B11, M0134-C01, M0134-C02, M0134-C06, M0134-C09, M0134-C10, M0134-C11, M0134-C12, M0134-D02, M0134-DO3, M0134-E04, M0134-E07, M0134-E08, M134-E11, M0134-FO1, M0134-F05, M0134-G02, M0134-G04, M0134-G07, M0135-A03, M0135-A05, M0135-A06, M0135-A07, M0135-B02, M0135-B08, M0135-C01, M0135-C11, M0135-E03, M0135-F03, M0135-F11, M0135-G02, M0135-G03, M0135-G07, M0135-G11, M0135-H03, M0135-H10, M0105-C05, M0105-E11, M0105-F08, M0107-A12, M0108-A02, M0109-G11, M0110-G05, M0129-B11, M0130-A01, M0130-C12, M0130-F06, M0130-H04, M0131-A06, M0131-D03, M0132-A04, M0133-B08, M0133-E05, M0121-E07, M0118-F11, M0125-G07, M0124-E07, M0119-D01, M0119-A02, M0122-C06, M0123-G07, M0063-A02, M0063-A04, M0063-B01, M0063-B11, M0063-C07, M0063-G01, M0065-E12, M0065-G03, M0065-H05, M0067-A02, M0067-B06, M0067-B09, M0067-C10, M0067-F02, M0067-F06, M0069-A04, M0069-A11, M0069-C02, M0069-D10, M0069-G07, M0071-A01, M0071-B07, M0071-D05, M0071-D09, M0071-H03, M0071-H06, M0087-F09, M0088-F07, M0088-G10, M0088-H10, M0089-C01, M0089-F05, M0089-B07, M0089-H11, M0034-C04, M0039-FO1, M0041-B05, M0041-G01, M0042-B06, M0006-B10, M0007-H06, M0008-H09, M0009-H08, M0011-H11, M0015-F02, M0016-D01, M0013-D11, M0013-G12, M0013-H06, M0014-C09, M0014-G11, M0016-A11, M0016-H05, M0019-C05, M0020-B01, M0022-C07, M0025-D04 and M0027-E11.

15-25. (canceled)

26. A method of inhibiting an interaction between MMP-12 and an MMP-12 substrate, the method comprising: contacting an MMP-12 binding protein of claim 1 with MMP-12, wherein the binding protein binds to MMP-12 and thereby prevents the binding of the MMP-12 substrate to MMP-12.

27. An MMP-12 binding protein-drug conjugate, wherein the conjugate comprises a MMP-12 binding protein of claim 1 and a drug.

28-31. (canceled)

32. A pharmaceutical composition comprising an MMP-12 binding protein of claim 1 and a pharmaceutically acceptable carrier.

33. A method of detecting an MMP-12 in a sample, the method comprising:
contacting the sample with an MMP-12 binding protein of claim 1; and detecting an interaction between the protein and the MMP-12, if present.

34. (canceled)

35. A method of modulating MMP-12 activity, the method comprising:
contacting an MMP-12 with an MMP-12 binding protein of claim 1, thereby modulating MMP-12 activity.

36. A method for modulating metastatic activity in a subject, the method comprising:
administering, to a subject, an MMP-12 binding protein of claim 1 in an amount effective to modulate metastatic activity.

37. A method of treating cancer, the method comprising:
administering, to a subject, an MMP-12 binding protein of claim 1 in an amount sufficient to treat a cancer in the subject.

38. (canceled)

39. A method of treating inflammation, the method comprising:
administering, to a subject, an MMP-12 binding protein of claim 1 in an amount sufficient to treat inflammation in the subject.

40. (canceled)

41. A method of treating a disease associated with inflammation of the lung, the method comprising:
administering, to a subject, an MMP-12 binding protein of claim 1 in an amount sufficient to treat a disease associated with inflammation of the lung in the subject.

42. (canceled)

43. A method of treating cardiovascular disease, the method comprising:
administering, to a subject, an MMP-12 binding protein of claim 1 in an amount sufficient to treat cardiovascular disease in the subject.

44. (canceled)

45. A method of treating a stroke or aneurysm, the method comprising:
administering, to a subject, an MMP-12 binding protein of claim 1 in an amount sufficient to treat a stroke or aneurysm in the subject.

46. (canceled)

47. A method of treating nerve damage, the method comprising:
administering, to a subject, an MMP-12 binding protein of claim 1 in an amount sufficient to treat the nerve damage in the subject.

48. (canceled)

49. A method of imaging a subject, the method comprising:
administering an MMP-12 binding protein of claim 1 to the subject.

50. (canceled)
